(19) United States
(12) Patent Application Publication
(10) Pub. No.: US 2024/0060136 A1
(43) Pub. Date: Feb. 22, 2024

(54) METHODS FOR DETECTING AND PREDICTING GRADE 3 CERVICAL EPITHELIAL NEOPLASIA (CIN3) AND/OR CANCER

(71) Applicant: UCL Business Ltd, London (GB)

(72) Inventors: Martin Widschwendter, London (GB); James Barrett, London (GB); Allison Jones, London (GB); Iona Evans, London (GB)

(21) Appl. No.: 18/009,957

(22) PCT Filed: Jun. 17, 2021
(86) PCT No.: PCT/GB2021/051537

§ 371 Date: Dec. 12, 2022

(30) Foreign Application Priority Data
Jun. 17, 2020 (GB) 2009225.0
May 25, 2021 (GB) 2107421.6

(51) Int. Cl. C12Q 1/6886; C12Q 1/70; C12Q 1/6837

(52) U.S. Cl. CPC C12Q 1/6886; C12Q 1/708; C12Q 1/6837; C12Q 2600/154; C12Q 1/6806

(57) ABSTRACT

The present invention relates to assays for predicting the presence, absence or development of CIN3 and/or cancer, particularly cervical or endometrial cancer, most preferably cervical cancer, in an individual, particularly cervical and endometrial cancer, by determining the methylation status of certain CpGs in a population of DNA molecules in a sample which has been taken from the individual, deriving an index value based on the methylation status of the certain CpGs, and predicting the presence, absence or development of CIN3 and/or cancer, particularly cervical or endometrial cancer, most preferably cervical cancer, in the individual based on the cancer index value. The invention further relates to a method of treating and/or prevention of cancer in an individual, particularly cervical and endometrial cancer, the method comprising assessing the presence, absence or development of CIN3 and/In or cancer, particularly cervical or endometrial cancer, most preferably cervical cancer, in an individual by performing the assays of the invention, followed by administering one or more therapeutic treatments or measures to the individual based on the assessment. The invention further provides a method of monitoring the CIN3 and/or cancer status of an individual according to changes in the individual's cancer index value over the course of time. The invention further relates to arrays which are suitable for performing the assays of the invention.

### SEQUENCE LISTING

[0001] The instant application contains a Sequence Listing which has been submitted electronically in ASCII format and is hereby incorporated by reference in its entirety. Said ASCII copy, created on Jun. 9, 2021, is named ‘Sequence listing as filed 17 Jun. 2021 N417235WO MGW JAS.txt’ and is 3,022,158 bytes in size.

### FIELD OF THE INVENTION

[0002] The present invention relates to assays for predicting the presence, absence or development of grade 3 cervical intra-epithelial neoplasia (CIN3) and/or cancer in an individual, particularly cervical or endometrial cancer, most preferably cervical cancer, by determining the methylation status of certain CpGs in a population of DNA molecules in a sample which has been taken from the individual, deriving an index value based on the methylation status of the certain CpGs, and predicting the presence, absence or development of CIN3 and/or cancer, particularly cervical or endometrial cancer, most preferably cervical cancer, in the individual based on the cancer index value. The invention further relates to a method of treating and/or preventing CIN3 and/or cervical cancer in an individual, the method comprising assessing the presence, absence or development of CIN3 and/or cancer, particularly cervical or endometrial cancer, most preferably cervical cancer, in an individual by performing the assays of the invention, followed by administering one or more therapeutic or preventative treatments or measures to the individual based on the assessment. The invention further provides a method of monitoring the CIN3 and/or cancer status of an individual according to changes in the individual's cancer index value over the course of time. The invention further relates to arrays which are suitable for performing the assays of the invention.

[0003] The project leading to this application has been funded by the European Commission's Horizon 2020 Research and Innovation Action, H2020 FORECEE under Grant Agreement No. 634570, the European Commission's Horizon 2020 European Research Council Executive Agency, H2020 BRCA-ERC under Grant Agreement No. 742432 as well as the charity, The Eve Appeal.

### BACKGROUND TO THE INVENTION

[0004] Cervical cancer screening has been the most successful personalised cancer prevention strategy to date; the screening aims to identify women with a pre-invasive lesion, which is then surgically excised.

[0005] At this point in time, the majority of countries are changing screening from cytology to HPV testing as the primary screen and utilising cytology to triage HPV+ve women for colposcopic assessment. However, several challenges remain for HPV-based screening:
[0006] (1) Low specificity of HPV: HPV is highly prevalent in cytology-ye women which is up to 24% depending on age and country and even in HPV-vaccinated women the prevalence of HPV infection is approximately 5%.
[0007] (2) Low sensitivity of cytology in HPV+ve women: approximately 31% of CIN3+(CIN3 or invasive cancers) in HPV+ve women are primarily cytology-ye and are only diagnosed with CIN3+12 months later due colposcopy triggered by HPV-persistence or becoming cytology+ve.
[0008] (3) The participation rates amongst European countries vary between 40.5% and 81.4% and efforts to increase participation are essential. A recent meta-analysis provided strong evidence that self-sampling has a consistently higher acceptance over clinician sampling. HPV testing shows comparable results in self-versus clinician-collected samples, but the fact that less than 60% of women who provide a self-collected sample show compliance with follow up recommendations indicates that a test other than cytology to triage women based on the same self-collected sample which tested HPV+ve is required in order to increase acceptability and eventually participation rates.

[0009] To date, the best performing triage algorithm for HPV+ve women with respect to diagnosing CIN3+ is dual immunostaining for p16/Ki-67; both cytology and dual staining have a specificity of 75% but dual staining is more sensitive (74.9%) when compared with conventional cytology (51.9%).

[0010] The present inventors, along with other investigators, have previously shown the feasibility of utilising DNA methylation markers in order to identify women with pre-invasive or invasive cancers. The clinical use of DNA methylation markers to identify women at high risk for CIN3+ has been hindered by several factors:
[0011] (i) An unacceptably low sensitivity in detecting CIN3 or CIN 3+, particularly in young women who have a substantially higher prevalence of HPV. These women therefore have an increased need for triage testing with high performance, for instance, the GynTect test (which utilises DNA methylation of six genes) has a sensitivity for CIN3 which varies between 35% in <30 year old and 76% in ≥30 year old women and the sensitivity in detecting CIN3+ for the QIAsure (which uses methylation of two genes) varies between 37.5% in <30 year old and 89.3% in ≥30 year old women who were referred with an abnormal cytology.
[0012] (ii) A low specificity which is also age dependent and comparable to cytology ranging from 76.6% in ≥30 year old women to 87.8% in <30 year old women.
[0013] (iii) A lack of data prevents judgement as to whether a DNA methylation marker or marker panel is capable of identifying HPV+ve women which, despite being cytology-ye at the time of assessment, go on to develop CIN3+ in succeeding years.

[0014] Using a cohort-based nested case/control setting, the inventors have developed and validated a DNA methylation signature (called Women's cancer risk IDentification CIN3 index, WID-CIN3-index) in cervical smear samples which is capable of both diagnosing and predicting the future risk of CIN3+ in an individual as well as cancer, particularly cervical or endometrial cancer, most preferably cervical cancer.

### SUMMARY OF THE INVENTION

[0015] The current inventors set out to understand whether DNAme (DNA methylation) profiles may be used to detect the presence or absence of grade 3 cervical intra-epithelial neoplasia (CIN3) and/or cervical cancer. The inventors also set out to understand whether said DNAme profiles may be associated with the development of CIN3 and/or cancer, particularly cervical or endometrial cancer, most preferably cervical cancer, and therefore whether such profiles may be capable of functioning as surrogate markers for individual stratification purposes in connection with CIN3 and/or cervical cancer.

[0016] In this regard the inventors have succeeded in developing assays involving “cancer index values” which are derived from and associated with DNAme profiles established from samples comprising epithelial cells. The sample may particularly be derived from the cervix, the vagina, the buccal area, blood and/or urine. The sample is preferably a cervical liquid-based cytology sample, and more preferably a cervical smear sample and which values can be used to stratify the individual in connection with cancer. A preferred sample for use in any of the assays described and defined herein is a cervical tissue sample. A particularly preferred sample for use in any of the assays described and defined herein is a cervical smear sample.

[0017] The cancer index value is determined from data relating to the methylation status of one or more CpGs in a panel of CpGs as further defined and described herein. CpGs of the panel are methylation sites in DNA from cells derived from/obtained from samples from tissue in which the native tissue structure is preserved e.g. a biopsy, or a sample comprising exfoliated cells from a tissue surface. The samples may comprise epithelial cells. The sample may particularly be derived from the cervix, the vagina, the buccal area, blood and/or urine. The sample is preferably a cervical smear sample and more preferably a cervical liquid-based cytology sample which can be collected by a health care professional or by a women herself (self-collection).

[0018] For the purposes of the present invention, the cancer index value may be used interchangeably herein with “WID-CIN-Index”, “WID-Index”, “cancer index”, “index” or “index value” (WID=women's risk identification). Furthermore, any reference to a cancer index value in the context of the present invention, may be equally used for the assessment of the presence, absence or development of CIN3 and/or cancer, particularly cervical or endometrial cancer, most preferably cervical cancer, in an individual.

[0019] Based on studies with patients known to be CIN3-negative and/or free of cervical cancer, the inventors have established cancer index values, using specific panels of CpGs, which have been determined to be associated with/characteristic of cervical tissue which is CIN3-negative and/or negative for cervical cancer. Based on studies with patients known to possess CIN3 and/or cervical cancer, the inventors have established cancer index values which have been determined to be associated with/characteristic of cervical tissue which is positive for CIN3 and/or cervical cancer. Based on studies with patients known to be CIN3-negative and/or free of cervical cancer, wherein the same patients when assayed between one to four years later are subsequently shown determined to be CIN3-positive and/or positive for cervical cancer, the inventors have established cancer index values which have been determined to be associated with/characteristic of cervical tissue which is positive for CIN3 and/or cervical cancer.

[0020] Thus, the inventors have been able to establish cancer index values, using specific panels of CpGs, which can characterize an individual as having CIN3 and/or cancer or not having CIN3 and/or cancer, or having a high risk of CIN3 and/or cancer development. The cancer is preferably cervical or endometrial cancer, most preferably cervical cancer.

[0021] By determining the methylation profile-based cancer index value from a sample derived from the individual, the individual may be seen to possess a cancer index value which correlates with those possessed by individuals which are known, via the inventor's studies described herein, to be CIN3 positive or negative and/or cervical cancer positive or negative, or to become CIN3 positive or negative and/or cervical cancer positive or negative. Such correlations have been determined with a high degree of statistical accuracy, particularly with respect to parameters relevant to biological assays such as receiver operating characteristics (ROC) sensitivity and specificity, as well as area under the curve (AUC). Accordingly, by determining the cancer index value from a sample from a given individual, the individual may be determined to possess cervical tissue that is positive for CIN3 and/or cancer, i.e. the individual is diagnosed as having CIN3 and/or cervical cancer. Conversely, by determining the cancer index value from a sample from a given individual, the individual may be determined to possess cervical tissue which is negative for CIN3 and/or cancer, i.e. the individual is diagnosed as not having CIN3 and/or cervical cancer.

[0022] Assessment of CIN3 in accordance with assays of the invention may identify individuals likely to develop CIN3 in the future, particularly within about four years from the date of to the first assessment of the individual with the one or more of the assays described herein.

[0023] Assessment of the development of cancer in accordance with the assays of the invention may refer to assessing progression or worsening of a pre-existing cancer lesion in an individual. Assessment of the development of cancer in accordance with the assays of the invention may refer to predicting the likelihood of recurrence of cancer.

[0024] The observations described herein establish that the cancer index value, as further described and defined herein, is dynamic and can change over the course of time. The cancer index value may therefore be used to monitor an individual's cancer status and risk of cancer development. Moreover, the cancer index value may be used to monitor the efficacy of cancer treatments being administered to an individual, including therapeutic treatments and preventative treatments.

[0025] Accordingly, in the context of the present invention, by determining the cancer index value from a sample from a given individual it is possible to assess the presence, absence or development of CIN3 and/or cancer, particularly cervical or endometrial cancer, most preferably cervical cancer, in an individual, or in other words to stratify the individual for cancer. In the context of the present invention, stratification for cancer is the process of categorizing the individual as being a member of a group of individuals who possess a phenotype in connection with cancer, including the presence or absence of cancer in the individual, or the development of cancer, i.e. by having epithelial cells, particularly derived from the cervix, the vagina, the buccal area, blood and/or urine, more preferably a cervical smear sample and even more preferably a cervical liquid-based cytology sample.

[0026] As explained herein, the assay methods of the invention are based on a cancer index value derived from a methylation profile from DNA originating from cells, particularly derived from the cervix, the vagina, the buccal area, blood and/or urine, more preferably a cervical liquid-based cytology sample, and even more preferably a cervical smear sample. Accordingly, the assays provide means for correlating an epithelial cell, or most preferably a cervical smear sample-derived DNA methylation profile with a status connected with cervical or endometrial cancer ranging from the individual being cancer negative, to the individual being cancer positive, with high statistical accuracy. Because the assays of the invention provide a correlation between the methylation profile and the disease status, the skilled person will appreciate that as part of the stratification process and outcome, disease status is assigned on the basis of a likelihood. As such, the methods of the invention provide assays which are predictive of an individual's status with respect to cancer. The assays of the invention accordingly provide means for predicting the presence or absence of cancer in an individual. The assays of the invention accordingly also provide means for predicting the development of cancer in an individual. The assays of the invention can provide means for predicting the development of cancer in an individual since the inventors have demonstrated that specific cancer index values can define cervical and endometrial tissue which is cancer negative, whilst others can define cervical and endometrial tissue which is cancer positive, and since the specific cancer index values may be dynamic and thereby increased in association with tumour stage and further increased cancer risk factors such as the women being post-menopausal, the values may be subject to change along a scale of cancer risk.

[0027] Whilst disease status may be assigned on the basis of a likelihood, the inventors have demonstrated herein that correlations between DNA methylation profile and cancer status using cancer index values can be achieved with a very high degree of statistical accuracy using parameters relevant to biological assays, as described further herein. As such, the assays of the invention provide means for predicting the presence or absence of cancer in an individual and for predicting the development of cancer in an individual, and for stratifying an individual for cancer, and wherein the prediction/stratification can be defined to be statistically highly reliable and robust. This in turn means that the prediction/stratification can be made with a high level of confidence. The assays of the invention can be defined to be statistically accurate by means known in the art, as further described and defined herein. The assays of the invention can be defined according to parameters relating to their statistical specificity and sensitivity. These parameters define the likelihood of false positive and false negative test results. The lower the proportion of false positive and false negative test results the more statistically accurate the assay becomes. In this regard the inventors have established CpG panels, as described and defined further herein, wherein the methylation status of CpGs in the panel can be used to establish cancer index values such that the assays produce statistically accurate predictions of cancer status. Accordingly, the inventors have determined that the assays described herein may be defined according to statistical parameters such as percentage specificity and sensitivity and also by receiver operating characteristics (ROC) area under the curve (AUC). All such means are known in the art and are known to be defined measures of statistical accuracy for biological assays such as those described and defined herein.

[0028] Thus the methods of the invention provide assays which can be used, with a high degree of statistical accuracy, to predict the presence, absence or development of CIN3 and/or cancer, particularly cervical and endometrial cancer, most preferably cervical cancer. The methods of the invention provide assays which can be used, with a high degree of statistical accuracy, to stratify an individual with respect to cancer status. Accordingly, the methods of the invention provide useful information to individuals and their physicians concerning patient cancer status. This information may help inform actual therapeutic treatment measures if the presence of cancer is identified in the individual. The information may help to monitor the progress of therapeutic treatment measures in the individual by monitoring changes in the cancer index value over the course of a period of time. The information may help to monitor the progress of prophylactic or preventative treatment measures in the individual by monitoring changes in the cancer index value over the course of a period of time. As such the methods of the invention offer significant advantages in the personalized prevention and early detection as well as treatment and management of cancer in individuals.

[0029] Accordingly, the invention provides an assay for assessing the presence, absence or development of grade 3 cervical intra-epithelial neoplasia (CIN3) and/or cancer in an individual, the assay comprising:
[0030] 1. providing a sample which has been taken from the individual, the sample comprising a population of DNA molecules;
[0031] 2. determining in the population of DNA molecules in the sample the methylation status of a panel of:
   [0032] i. one or more CpGs selected from a panel of CpGs identified in SEQ ID NOs 1 to 5000 wherein the CpGs are identified at nucleotide positions 61 to 62; and/or
   [0033] ii. one or more CpGs selected from within a panel of one or more Differentially Methylated Regions (DMRs) defined by SEQ ID NOs 5001 to 5418, wherein the CpGs are denoted by CG;
[0034] 3. deriving a cancer index value based on the methylation status of the one or more CpGs in the panel; and
[0035] 4. assessing the presence, absence or development of CIN3 and/or cancer, preferably wherein the cancer is cervical cancer, in the individual based on the cancer index value;
[0036] wherein the assay is characterised as having an area under the curve (AUC) of 0.60 or more as determined by receiver operating characteristics (ROC).

[0037] The assay of the invention may be performed as above and additionally wherein the panel of one or more CpGs comprises at least 500 CpGs selected from the CpGs identified at nucleotide positions 61 to 62 in SEQ ID NOs 1 to 5000, preferably wherein the assay is characterised as having an AUC of at least 0.80.

[0038] The assay of the invention may be performed as above and additionally wherein the panel of one or more CpGs comprises at least the CpGs identified in SEQ ID NOs 1 to 500 and identified at nucleotide positions 61 to 62, preferably wherein the assay is characterised as having an AUC of at least 0.92.

[0039] The assay of the invention may be performed as above and additionally wherein the panel of one or more CpGs comprises at least 1000 CpGs selected from the CpGs identified at nucleotide positions 61 to 62 in SEQ ID NOs 1 to 5000, preferably wherein the assay is characterised as having an AUC of at least 0.80.

[0040] The assay of the invention may be performed as above and additionally wherein the panel of one or more CpGs comprises at least the CpGs identified in SEQ ID NOs 1 to 1000 and identified at nucleotide positions 61 to 62, preferably wherein the assay is characterised as having an AUC of at least 0.92.

[0041] The assay of the invention may be performed as above and additionally wherein the panel of one or more CpGs comprises at least 1500 CpGs selected from the CpGs identified at nucleotide positions 61 to 62 in SEQ ID NOs 1 to 5000, preferably wherein the assay is characterised as having an AUC of at least 0.82.

[0042] The assay of the invention may be performed as above and additionally wherein the panel of one or more CpGs comprises at least the CpGs identified in SEQ ID NOs 1 to 1500 and identified at nucleotide positions 61 to 62, preferably wherein the assay is characterised as having an AUC of at least 0.92.

[0043] The assay of the invention may be performed as above and additionally wherein the panel of one or more CpGs comprises at least 2000 CpGs selected from the CpGs identified at nucleotide positions 61 to 62 in SEQ ID NOs 1 to 5000, preferably wherein the assay is characterised as having an AUC of at least 0.81.

[0044] The assay of the invention may be performed as above and additionally wherein the panel of one or more CpGs comprises at least the CpGs identified in SEQ ID NOs 1 to 2000 and identified at nucleotide positions 61 to 62, preferably wherein the assay is characterised as having an AUC of at least 0.92.

[0045] The assay of the invention may be performed as above and additionally wherein the panel of one or more CpGs comprises at least the 5000 CpGs identified at nucleotide positions 61 to 62 in SEQ ID NOs 1 to 5000, and further wherein the assay is characterised as having an AUC of at least 0.92.

[0046] The assay of the invention may be performed as above and additionally wherein the step of determining in the population of DNA molecules in the sample the methylation status of the one or more CpGs in the panel comprises determining a β value of each CpG.

[0047] The assay of the invention may be performed as above and additionally wherein the step of deriving the cancer index value based on the methylation status of the one or more CpGs in the panel comprises:
[0048] 1. providing a methylation β-value data set comprising the methylation β-values for each CpG in the panel;
[0049] 2. providing a mathematical model capable of generating the cancer index from the methylation β-value data set; and
[0050] 3. applying the mathematical model to the methylation β-value data set, thereby generating the cancer index.

[0051] The assay of the invention may be performed as above and additionally wherein the cancer index value is a WID-CIN-Index cancer index value, and wherein the mathematical model which is applied to the methylation β-value data set to generate the cancer index is an algorithm according to the following formula:

$$WID - CIN - index = {\sum }_{i = 1}^{n} \frac{μ - {w}_{i} {β}_{i}}{σ}$$

[0052] wherein:
[0053] 1. β₁, . . . , βₙ are methylation beta-values (between 0 and 1);
[0054] 2. w₁, . . . , w₅₀₀₀ are real valued coefficients;
[0055] 3. μ and σ are real valued parameters used to scale the index; and
[0056] 4. n refers to the number of CpGs in the panel of one or more CpGs; preferably wherein the cancer is cervical cancer.

[0057] The assay of the invention may be performed as above and additionally wherein when the cancer index value for the individual is about −0.331 or more, the individual is assessed as having CIN3 and/or cancer or as having a high risk of CIN3 and/or cancer development, or wherein when the cancer index value for the individual is less than about −0.331, the individual is assessed as not having CIN3 and/or cancer or as having a low risk of CIN3 and/or cancer development, preferably wherein:
[0058] a. the panel of one or more CpGs comprises at least 500 of the CpGs identified at nucleotide positions 61 to 62 in SEQ ID NOs 1 to 5000, and wherein the sensitivity is at least 87% and the specificity is at least 49%;
[0059] b. the panel of one or more CpGs comprises at least the CpGs defined by SEQ ID NOs 1 to 500 and identified at nucleotide positions 61 to 62, and wherein the sensitivity is at least 86% and specificity is at least 77%;
[0060] c. the panel of one or more CpGs comprises at least the CpGs defined by SEQ ID NOs 1 to 1000 and identified at nucleotide positions 61 to 62, and wherein the sensitivity is at least 87% and specificity is at least 77%; or
[0061] d. the panel of one or more CpGs comprises at least the CpGs defined by SEQ ID NOs 1 to 1500 and identified at nucleotide positions 61 to 62, and wherein the sensitivity is at least 89% and specificity is at least 76%;
   preferably wherein the assay comprises determining methylation β-values for each CpG in the panel of one or more CpGs, more preferably wherein the cancer is cervical cancer.

[0062] The assay of the invention may be performed as above and additionally wherein when the cancer index value for the individual is about −0.167 or more, the individual is assessed as having CIN3 and/or cancer, or as having a high risk of CIN3 and/or cancer development, or wherein when the cancer index value for the individual is less than about −0.167, the individual is assessed as not having CIN3 and/or cancer or as having a low risk of CIN3 and/or cancer development, preferably wherein:
[0063] a. the panel of one or more CpGs comprises at least 500 of the CpGs identified at nucleotide positions 61 to 62 in SEQ ID NOs 1 to 5000, and wherein the sensitivity is at least 80% and the specificity is at least 61%;
[0064] b. the panel of one or more CpGs comprises at least the CpGs defined by SEQ ID NOs 1 to 500 and identified at nucleotide positions 61 to 62, and wherein the sensitivity is at least 77% and specificity is at least 90%;
[0065] c. the panel of one or more CpGs comprises at least the CpGs defined by SEQ ID NOs 1 to 1000 and identified at nucleotide positions 61 to 62, and wherein the sensitivity is at least 72% and specificity is at least 89%; or
[0066] d. the panel of one or more CpGs comprises at least the CpGs defined by SEQ ID NOs 1 to 1500 and identified at nucleotide positions 61 to 62, and wherein the sensitivity is at least 78% and specificity is at least 91%;
[0067] preferably wherein the assay comprises determining methylation β-values for each CpG in the panel of one or more CpGs, more preferably wherein the cancer is cervical cancer.

[0068] The assay of the invention may be performed as above and additionally wherein the step of determining the methylation status of a panel of one or more CpGs comprises determining the methylation status of one or more CpGs denoted by CG identified in a panel of one or more DMRs defined by SEQ ID NOs 5001 to 5418, optionally wherein the panel of one or more CpGs comprises two or more CpGs denoted by CG identified in the panel of DMR(s), three or more CpGs denoted by CG identified in the panel of DMR(s), four or more CpGs denoted by CG identified in the panel of DMR(s), or all CpGs denoted by CG identified in the DMR(s) defined by SEQ ID NOs 5001 to 5418.

[0069] The assay of the invention may be performed as above and additionally wherein the step of determining the methylation status of a panel of the one or more CpGs comprises determining the methylation status of five or more, six or more, seven or more, eight or more, or nine or more, or all of the CpGs denoted by CG within any one or more of the DMRs defined by SEQ ID NOs 5001 to 5418.

[0070] The assay of the invention may be performed as above and additionally wherein the step of determining the methylation status of a panel of one or more CpGs comprises determining the methylation status of two or more, three or more, four or more, five or more, six or more, seven or more, eight or more, or nine or more, or all of the CpGs denoted by CG within:
[0071] 1. any combination of two, three, four, five, six, seven, eight, or nine or more of DMRs 1 to 418;
[0072] 2. any combination of ten, twenty, thirty, forty, fifty, sixty, seventy, eighty, or ninety or more of DMRs 1 to 418;
[0073] 3. all 418 of DMRs 1 to 418;
[0074] 4. one DMR defined by SEQ ID NO: 5001, two DMRs defined by SEQ ID NOs: 5001 to 5002, three DMRs defined by SEQ ID NOs: 5001 to 5003, four DMRs defined by SEQ ID NOs: 5001 to 5004, five DMRs defined by SEQ ID NOs: 5001 to 5005, six DMRs defined by SEQ ID NOs: 5001 to 5006, seven DMRs defined by SEQ ID NOs: 5001 to 5007, eight DMRs defined by SEQ ID NOs: 5001 to 5008, or nine DMRs defined by SEQ ID NOs: 5001 to 5009;
[0075] 5. any combination of one or more DMRs defined by SEQ ID NO: 5391, SEQ ID NO: 5392, SEQ ID NO: 5393, SEQ ID NO: 5407 and SEQ ID NO: 5414, preferably within all of SEQ ID NO: 5391, SEQ ID NO: 5392, SEQ ID NO: 5393, SEQ ID NO: 5407 and SEQ ID NO: 5414;
[0076] 6. any combination of one or more DMRs defined by SEQ ID NO: 5392, SEQ ID NO: 5393 and SEQ ID NO: 5407, preferably within all of SEQ ID NO: 5392, SEQ ID NO: 5393 and SEQ ID NO: 5407;
[0077] 7. ten DMRs defined by SEQ ID NOs: 5001 to 5010, twenty DMRs defined by SEQ ID NOs: 5001 to 5020, thirty DMRs defined by SEQ ID NOs: 5001 to 5030, forty DMRs defined by SEQ ID NOs: 5001 to 5040, fifty DMRs defined by SEQ ID NOs: 5001 to 5050, sixty DMRs defined by SEQ ID NOs: 5001 to 5060, seventy DMRs defined by SEQ ID NOs: 5001 to 5070, eighty DMRs defined by SEQ ID NOs: 5001 to 5080, or ninety DMRs defined by SEQ ID NOs: 5001 to 5090;
[0078] 8. fifty DMRs defined by SEQ ID NOs: 5001 to 5050, SEQ ID NOs: 5051 to 5100, SEQ ID NOs: 5101 to 5150, SEQ ID NOs: 5151 to 5200, SEQ ID NOs: 5201 to 5250, SEQ ID NOs: 5301 to 5350, or SEQ ID NOs: 5341 to 5418; or
[0079] 9. eighty one DMRs defined by SEQ ID NOs: 5015, 5016, 5017, 5025, 5026, 5027, 5028, 5029, 5032, 5033, 5048, 5049, 5050, 5053, 5054, 5057, 5068, 5069, 5071, 5072, 5073, 5074, 5075, 5076, 5077, 5083, 5090, 5091, 5092, 5093, 5094, 5095, 5096, 5099, 5102, 5137, 5138, 5140, 5143, 5146, 5147, 5148, 5149, 5150, 5151, 5164, 5165, 5167, 5175, 5176, 5177, 5179, 5180, 5185, 5204, 5224, 5226, 5228, 5232, 5246, 5248, 5285, 5287, 5293, 5307, 5309, 5315, 5317, 5324, 5328, 5337, 5339, 5340, 5348, 5349, 5354, 5361, 5362, 5366, 5368 and 5377.

[0080] The assay of the invention may be performed as above and additionally wherein the step of determining the methylation status of a panel of one or more CpGs comprises determining the methylation status of one or more CpGs within any one or more DMRs selected from the group of DMRs consisting of DMRs 1 to 418 as defined by SEQ ID NOs 5001 to 5418, including:
[0081] 1. one or more CpGs within DMR 1 as defined by SEQ ID NO: 5001 and denoted by CG, preferably wherein the assay is characterised as having an ROC AUC of at least 0.894, and more preferably wherein the panel of one or more CpGs comprises at least the CpGs denoted by [[CG]];
[0082] 2. one or more CpGs within DMR 2 as defined by SEQ ID NO: 5002 and denoted by CG, preferably wherein the assay is characterised as having an ROC AUC of at least 0.894, and more preferably wherein the panel of one or more CpGs comprises at least the CpGs denoted by [[CG]];
[0083] 3. one or more CpGs within DMR 3 as defined by SEQ ID NO: 5003 and denoted by CG, preferably wherein the assay is characterised as having an ROC AUC of at least 0.894, and more preferably wherein the panel of one or more CpGs comprises at least the CpGs denoted by [[CG]];
[0084] 4. one or more CpGs within DMR 4 as defined by SEQ ID NO: 5004 and denoted by CG, preferably wherein the assay is characterised as having an ROC AUC of at least 0.894, and more preferably wherein the panel of one or more CpGs comprises at least the CpGs denoted by [[CG]];
[0085] 5. one or more CpGs within DMR 5 as defined by SEQ ID NO: 5005 and denoted by CG, preferably wherein the assay is characterised as having an ROC AUC of at least 0.894, and more preferably wherein the panel of one or more CpGs comprises at least the CpGs denoted by [[CG]];
[0086] 6. one or more CpGs within DMR 6 as defined by SEQ ID NO: 5006 and denoted by CG, preferably wherein the assay is characterised as having an ROC AUC of at least 0.876, and more preferably wherein the panel of one or more CpGs comprises at least the CpGs denoted by [[CG]];
[0087] 7. one or more CpGs within DMR 7 as defined by SEQ ID NO: 5007 and denoted by CG, preferably wherein the assay is characterised as having an ROC AUC of at least 0.874, and more preferably wherein the panel of one or more CpGs comprises at least the CpGs denoted by [[CG]];
[0088] 8. one or more CpGs within DMR 8 as defined by SEQ ID NO: 5008 and denoted by CG, preferably wherein the assay is characterised as having an ROC AUC of at least 0.874, and more preferably wherein the panel of one or more CpGs comprises at least the CpGs denoted by [[CG]];
[0089] 9. one or more CpGs within DMR 9 as defined by SEQ ID NO: 5009 and denoted by CG, preferably wherein the assay is characterised as having an ROC AUC of at least 0.874, and more preferably wherein the panel of one or more CpGs comprises at least the CpGs denoted by [[CG]]; and/or
[0090] 10. one or more CpGs within DMR 10 as defined by SEQ ID NO: 5010 and denoted by CG, preferably wherein the assay is characterised as having an ROC AUC of at least 0.874, and more preferably wherein the panel of one or more CpGs comprises at least the CpGs denoted by [[CG]].

[0091] The assay of the invention may be performed as above and additionally wherein:
[0092] 1. when the cancer index for the individual is about 0.016 or more the individual is classified as having CIN3 and/or cancer or as having a high risk of CIN3 and/or cancer development; or
[0093] 2. when the cancer index for the individual is less than about 0.016 the individual is classified as not having CIN3 and/or cancer;
[0094] preferably wherein the assay has a specificity of 75% or more, more preferably wherein the assay comprises determining mean β-values for each CpG in the panel of one or more CpGs.

[0095] The assay of the invention may be performed as above and additionally wherein:
[0096] 1. CpGs denoted by CG whose cancer index value is determined are located within at least DMR 1 defined by SEQ ID NO: 5001, and wherein when the cancer index for the individual is about 0.023 or more the individual is classified as having CIN3 and/or cancer or as having a high risk of CIN3 and/or cancer development, and wherein the sensitivity of the assay is at least 85.00% and the specificity of the assay is at least 75.00%, preferably wherein the panel of one or more CpGs comprises at least ten CpGs from DMR 1, and more preferably wherein the cancer index value is the mean β-value for the CpGs denoted by [[CG]] in SEQ ID NO: 5001;
[0097] 2. CpGs denoted by CG whose cancer index value is determined are located within at least DMR 1 defined by SEQ ID NO: 5001, and wherein when the cancer index for the individual is less than about 0.023 the individual is classified as not having CIN3 and/or cancer or as having a low risk of CIN3 and/or cancer development, and wherein the sensitivity of the assay is at least 70.00% and the specificity of the assay is at least 75.00%, preferably wherein the panel of one or more CpGs comprises at least ten CpGs from DMR 1, and more preferably wherein the cancer index value is the mean β-value for the CpGs denoted by [[CG]] in SEQ ID NO: 5001;
[0098] 3. CpGs denoted by CG whose cancer index value is determined are located within at least DMR 2 defined by SEQ ID NO: 5002, and wherein when the cancer index for the individual is about 0.023 or more the individual is classified as having CIN3 and/or cancer or as having a high risk of CIN3 and/or cancer development, and wherein the sensitivity of the assay is at least 85.00% and the specificity of the assay is at least 75.00%, preferably wherein the panel of one or more CpGs comprises at least ten CpG from DMR 2, and more preferably wherein the cancer index value is the mean β-value for the CpGs denoted by [[CG]] in SEQ ID NO: 5002;
[0099] 4. CpGs denoted by CG whose cancer index value is determined are located within at least DMR 2 defined by SEQ ID NO: 5002, and wherein when the cancer index for the individual is less than about 0.023 the individual is classified as not having CIN3 and/or cancer or as having a low risk of CIN3 and/or cancer development, and wherein the sensitivity of the assay is at least 85.00% and the specificity of the assay is at least 75.00%, preferably wherein the panel of one or more CpGs comprises at least ten CpGs from DMR 2, and more preferably wherein the cancer index value is the mean β-value for the CpGs denoted by [[CG]] in SEQ ID NO: 5002;
[0100] 5. CpGs denoted by CG whose cancer index value is determined are located within at least DMR 3 defined by SEQ ID NO: 5003, and wherein when the cancer index for the individual is about 0.023 or more the individual is classified as having CIN3 and/or cancer or as having a high risk of CIN3 and/or cancer development, and wherein the sensitivity of the assay is at least 85.00% and the specificity of the assay is at least 75.00%, preferably wherein the panel of one or more CpGs comprises at least ten CpG from DMR 3, and more preferably wherein the cancer index value is the mean β-value for the CpGs denoted by [[CG]] in SEQ ID NO: 5003;
[0101] 6. CpGs denoted by CG whose cancer index value is determined are located within at least DMR 3 defined by SEQ ID NO: 5003, and wherein when the cancer index for the individual is less than about 0.023 the individual is classified as not having CIN3 and/or cancer or as having a low risk of CIN3 and/or cancer development, and wherein the sensitivity of the assay is at least 85.00% and the specificity of the assay is at least 75.00%, preferably wherein the panel of one or more CpGs comprises at least ten CpG from DMR 3, and more preferably wherein the cancer index value is the mean β-value for the CpGs denoted by [[CG]] in SEQ ID NO: 5003;
[0102] 7. CpGs denoted by CG whose cancer index value is determined are located within at least DMR 4 defined by SEQ ID NO: 5004, and wherein when the cancer index for the individual is about 0.023 or more the individual is classified as having CIN3 and/or cancer or as having a high risk of CIN3 and/or cancer development, and wherein the sensitivity of the assay is at least 85.00% and the specificity of the assay is at least 75.00%, preferably wherein the panel of one or more CpGs comprises at least ten CpG from DMR 4, and more preferably wherein the cancer index value is the mean β-value for the CpGs denoted by [[CG]] in SEQ ID NO: 5004;
[0103] 8. CpGs denoted by CG whose cancer index value is determined are located within at least DMR 4 defined by SEQ ID NO: 5004, and wherein when the cancer index for the individual is less than about 0.023 the individual is classified as not having CIN3 and/or cancer or as having a low risk of CIN3 and/or cancer development, and wherein the sensitivity of the assay is at least 85.00% and the specificity of the assay is at least 75.00%, preferably wherein the panel of one or more CpGs comprises at least ten CpG from DMR 4, and more preferably wherein the cancer index value is the mean β-value for the CpGs denoted by [[CG]] in SEQ ID NO: 5004;
[0104] 9. CpGs denoted by CG whose cancer index value is determined are located within at least DMR 5 defined by SEQ ID NO: 5005, and wherein when the cancer index for the individual is about 0.023 or more the individual is classified as having CIN3 and/or cancer or as having a high risk of CIN3 and/or cancer development, and wherein the sensitivity of the assay is at least 85.00% and the specificity of the assay is at least 75.00%, preferably wherein the panel of one or more CpGs comprises at least ten CpG from DMR 5, and more preferably wherein the cancer index value is the mean β-value for the CpGs denoted by [[CG]] in SEQ ID NO: 5005; and/or
[0105] 10. CpGs denoted by CG whose cancer index value is determined are located within at least DMR 5 defined by SEQ ID NO: 5005, and wherein when the cancer index for the individual is less than about 0.023 the individual is classified as not having CIN3 and/or cancer or as having a low risk of CIN3 and/or cancer development, and wherein the sensitivity of the assay is at least 85.00% and the specificity of the assay is at least 75.00%, preferably wherein the panel of one or more CpGs comprises at least ten CpG from DMR 5, and more preferably wherein the cancer index value is the mean β-value for the CpGs denoted by [[CG]] in SEQ ID NO: 5005.

[0106] The assay of the invention may be performed as above and additionally wherein the step of determining the methylation status of the one or more CpGs in the panel further comprises or additionally comprises determining the methylation status of each CpG within one or more of the sequences identified by SEQ ID NOs 5703 to 5786.

[0107] The assay of the invention may be performed as above and additionally wherein the step of determining the methylation status of the one or more CpGs in the panel comprises determining each CpG within:
[0108] 1. SEQ ID NO 5759 and/or SEQ ID NO 5703 and/or SEQ ID NO 5731, and wherein when the cancer index value is about 1.146 or more the individual is classified as having CIN3 and/or cervical cancer or as having a high risk of CIN3 and/or cervical cancer development, and wherein the sensitivity of the assay is at least 95.00%, the specificity of the assay is at least 75.00%, and the AUC is 0.96, preferably wherein the cancer index value is the percent methylated reference for sequence defined by SEQ ID NO 5759 and/or SEQ ID NO 5703 and/or SEQ ID NO 5731;
[0109] 2. SEQ ID NO 5759 and/or SEQ ID NO 5703 and/or SEQ ID NO 5731, and wherein when the cancer index value is less than about 1.146 the individual is classified as not having CIN3 and/or cervical cancer or as having a low risk of CIN3 and/or cervical cancer development, and wherein the sensitivity of the assay is at least 95.00%, the specificity of the assay is at least 75.00%, and the AUC is 0.96, preferably wherein the cancer index value is the percent methylated reference for sequence defined by SEQ ID NO 5759 and/or SEQ ID NO 5703 and/or SEQ ID NO 5731;
[0110] 3. SEQ ID NO 5760 and/or SEQ ID NO 5704 and/or SEQ ID NO 5732, and wherein when the cancer index value is about 0.473 or more the individual is classified as having CIN3 and/or cervical cancer or as having a high risk of CIN3 and/or cervical cancer development, and wherein the sensitivity of the assay is at least 75.00%, the specificity of the assay is at least 85.00%, and the AUC is 0.96, preferably wherein the cancer index value is the percent methylated reference for sequence defined by SEQ ID NO 5760 and/or SEQ ID NO 5704 and/or SEQ ID NO 5732;
[0111] 4. SEQ ID NO 5760 and/or SEQ ID NO 5704 and/or SEQ ID NO 5732, and wherein when the cancer index value is less than about 0.473 the individual is classified as not having CIN3 and/or cervical cancer or as having a low risk of CIN3 and/or cervical cancer development, and wherein the sensitivity of the assay is at least 75.00%, the specificity of the assay is at least 85.00%, and the AUC is 0.96, preferably wherein the cancer index value is the percent methylated reference for sequence defined by SEQ ID NO 5760 and/or SEQ ID NO 5704 and/or SEQ ID NO 5732;
[0112] 5. SEQ ID NO 5761 and/or SEQ ID NO 5705 and/or SEQ ID NO 5733, and wherein when the cancer index value is about 1.546 or more the individual is classified as having CIN3 and/or cervical cancer or as having a high risk of CIN3 and/or cervical cancer development, and wherein the sensitivity of the assay is at least 95.00%, the specificity of the assay is at least 75.00%, and the AUC is 0.95, preferably wherein the cancer index value is the percent methylated reference for sequence defined by SEQ ID NO 5761;
[0113] 6. SEQ ID NO 5761 and/or SEQ ID NO 5705 and/or SEQ ID NO 5733, and wherein when the cancer index value is less than about 1.546 the individual is classified as not having CIN3 and/or cervical cancer or as having a low risk of CIN3 and/or cervical cancer development, and wherein the sensitivity of the assay is at least 95.00%, the specificity of the assay is at least 75.00%, and the AUC is 0.95, preferably wherein the cancer index value is the percent methylated reference for sequence defined by SEQ ID NO 5761 and/or SEQ ID NO 5705 and/or SEQ ID NO 5733;
[0114] 7. SEQ ID NO 5762 and/or SEQ ID NO 5706 and/or SEQ ID NO 5734, and wherein when the cancer index value is about 1.645 or more the individual is classified as having CIN3 and/or cervical cancer or as having a high risk of CIN3 and/or cervical cancer development, and wherein the sensitivity of the assay is at least 85.00%, the specificity of the assay is at least 75.00%, and the AUC is 0.94, preferably wherein the cancer index value is the percent methylated reference for sequence defined by SEQ ID NO 5762 and/or SEQ ID NO 5706 and/or SEQ ID NO 5734;
[0115] 8. SEQ ID NO 5762 and/or SEQ ID NO 5706 and/or SEQ ID NO 5734, and wherein when the cancer index value is less than about 1.645 the individual is classified as not having CIN3 and/or cervical cancer or as having a low risk of CIN3 and/or cervical cancer development, and wherein the sensitivity of the assay is at least 85.00%, the specificity of the assay is at least 75.00%, and the AUC is 0.94, preferably wherein the cancer index value is the percent methylated reference for sequence defined by SEQ ID NO 5762 and/or SEQ ID NO 5706 and/or SEQ ID NO 5734;
[0116] 9. SEQ ID NO 5763 and/or SEQ ID NO 5707 and/or SEQ ID NO 5735, and wherein when the cancer index value is about 2.824 or more the individual is classified as having CIN3 and/or cervical cancer or as having a high risk of CIN3 and/or cervical cancer development, and wherein the sensitivity of the assay is at least 90.00%, the specificity of the assay is at least 75.00%, and the AUC is 0.94, preferably wherein the cancer index value is the percent methylated reference for sequence defined by SEQ ID NO 5763 and/or SEQ ID NO 5707 and/or SEQ ID NO 5735; and/or
[0117] 10. SEQ ID NO 5763 and/or SEQ ID NO 5707 and/or SEQ ID NO 5735, and wherein when the cancer index value is less than about 2.824 the individual is classified as not having CIN3 and/or cervical cancer or as having a low risk of CIN3 and/or cervical cancer development, and wherein the sensitivity of the assay is at least 90.00%, the specificity of the assay is at least 75.00%, and the AUC is 0.94, preferably wherein the cancer index value is the percent methylated reference for sequence defined by SEQ ID NO 5763 and/or SEQ ID NO 5707 and/or SEQ ID NO 5735.

[0118] The assay of the invention may be performed as above and additionally wherein the step of determining the methylation status of the one or more CpGs in the panel further comprises or additionally comprises determining the methylation status of each CpG within one or more of the sequences identified by SEQ ID NOs 5703, 5731, 5759, 5723, 5751, 5779, 5713, 5741, 5769, 5706, 5734, 5762, 5705, 5733, and 5761, or even more preferably wherein the panel of one or more CpGs further comprises or additionally comprises determining the methylation status of each CpG within one or more of the sequences identified by SEQ ID NOs 5703, 5731, 5759, 5713, 5741, 5769, 5706, 5734, and 5762.

[0119] The assay of the invention may be performed as above and additionally wherein the step of determining in the population of DNA molecules in the sample the methylation status of each CpG in the panel of one or more CpGs comprises:
[0120] 1. performing a sequencing step to determine the sequence of each CpG;
[0121] 2. hybridising DNA to an array comprising probes capable of discriminating between methylated and non-methylated forms of the CpGs and applying a detection system to the array so as to determine the methylation status of each CpG; and/or
[0122] 3. performing a PCR step using methylation-specific primers, wherein the methylation status of the CpG is determined by the presence or absence of a PCR product.

[0123] The assay of the invention may be performed as above and additionally wherein the step of determining the methylation status of each CpG in the panel of one or more CpGs comprises:
[0124] 1. bisulphite converting the DNA; or
[0125] 2. performing the steps of oxidising 5-methylcytosine bases (5mC) to 5-carboxylcytosine bases (5caC), preferably by ten-eleven translocation (TET), and/or oxidising 5-hydroxymethylcytosine bases (5hmC) to 5-carboxylcytosine bases (5caC), preferably by ten-eleven translocation (TET); followed by reducing 5-carboxylcytosine bases (5caC) to dihydrouracil bases (DHU), optionally with pyridine borane.

[0126] The invention also provides a method of treating or preventing CIN3 and/or cervical cancer in an individual, the method comprising:
[0127] 1. assessing the CIN3 and/or cervical cancer status of the individual by assessing the presence, absence or development of cancer in the individual by performing the assay of any one of the assays of the invention;
[0128] 2. administering one or more therapeutic or preventative treatments to the individual based on the assessment.

[0129] The method of the invention may be performed as above and additionally wherein the individual is assessed as not having CIN3 and/or cancer or as having a low risk of CIN3 and/or cancer development, and wherein the cancer index value is about −0.530 or more and is less than about −0.330, and preferably wherein the assay comprises determining methylation β-values for each CpG in the panel of one or more CpGs, the individual is subjected to one or more treatments according to their cancer index value, the one or more treatments comprise a repeat assay according to any one of the assays of the invention, preferably wherein the repeat assay is performed about one year after the previous assay.

[0130] The assay of the invention may be performed as above and additionally wherein the individual is assessed as having a moderate risk of having CIN3 and/or cancer or as having a moderate risk of CIN3 and/or cancer development, and wherein the cancer index value is about −0.330 or more and is less than about −0.170, and preferably wherein the assay comprises determining methylation β-values for each CpG in the panel of one or more CpGs, the individual is subjected to one or more treatments according to their cancer index value, the one or more treatments comprise a test for human papilloma virus (HPV) status and wherein:
[0131] 1. when the individual is HPV positive, a colposcopy, and optionally a transvaginal ultrasound and/or an endometrial biopsy to assess endometrium; or
[0132] 2. when the individual is HPV negative, a repeat assay according to the assays of the invention, preferably wherein the repeat assay is performed about one year after the previous assay.

[0133] The assay of the invention may be performed as above and additionally wherein the individual is assessed as having CIN3 and/or cancer or as having a high risk of CIN3 and/or cancer development, and wherein the cancer index value is about −0.170 or more, and preferably wherein the assay comprises determining methylation β-values for each CpG in the panel of one or more CpGs, the individual is subjected to one or more treatments according to their cancer index value, the one or more treatments comprise a colposcopy, and wherein the colposcopy is negative, an endometrial biopsy and hysteroscopy.

[0134] The assay of the invention may be performed as above and additionally wherein the individual is assessed as having CIN3 and/or cancer or as having a high risk of CIN3 and/or cancer development, and wherein the cancer index value is about:
[0135] 1. 5.000 or more, preferably wherein the step of determining the methylation status of the one or more CpGs in the panel comprises determining each CpG within SEQ ID NO 5768;
[0136] 2. 1.000 or more, preferably wherein the step of determining the methylation status of the one or more CpGs in the panel comprises determining each CpG within SEQ ID NO 5765;
[0137] 3. 2.000 or more, preferably wherein the step of determining the methylation status of the one or more CpGs in the panel comprises determining each CpG within SEQ ID NO 5759;
[0138] 4. 5.000 or more, preferably wherein the step of determining the methylation status of the one or more CpGs in the panel comprises determining each CpG within SEQ ID NO 5785;
[0139] 5. 4.000 or more, preferably wherein the step of determining the methylation status of the one or more CpGs in the panel comprises determining each CpG within SEQ ID NO 5763;
[0140] 6. 4.000 or more, preferably wherein the step of determining the methylation status of the one or more CpGs in the panel comprises determining each CpG within SEQ ID NO 5781;
[0141] 7. 1.000 or more, preferably wherein the step of determining the methylation status of the one or more CpGs in the panel comprises determining each CpG within SEQ ID NO 5769;
[0142] 8. 1.000 or more, preferably wherein the step of determining the methylation status of the one or more CpGs in the panel comprises determining each CpG within SEQ ID NO 5766;
[0143] 9. 4.000 or more, preferably wherein the step of determining the methylation status of the one or more CpGs in the panel comprises determining each CpG within SEQ ID NO 5761;
[0144] 10. 4.000 or more, preferably wherein the step of determining the methylation status of the one or more CpGs in the panel comprises determining each CpG within SEQ ID NO 5779;
[0145] 11. 4.000 or more, preferably wherein the step of determining the methylation status of the one or more CpGs in the panel comprises determining each CpG within SEQ ID NO 5764;
[0146] 12. 5.000 or more, preferably wherein the step of determining the methylation status of the one or more CpGs in the panel comprises determining each CpG within SEQ ID NO 5772;
[0147] 13. 2.000 or more, preferably wherein the step of determining the methylation status of the one or more CpGs in the panel comprises determining each CpG within SEQ ID NO 5773;
[0148] 14. 1.000 or more, preferably wherein the step of determining the methylation status of the one or more CpGs in the panel comprises determining each CpG within SEQ ID NO 5778;
[0149] 15. 5.000 or more, preferably wherein the step of determining the methylation status of the one or more CpGs in the panel comprises determining each CpG within SEQ ID NO 5767;
[0150] 16. 5.000 or more, preferably wherein the step of determining the methylation status of the one or more CpGs in the panel comprises determining each CpG within SEQ ID NO 5774;
[0151] 17. more than 0.000, preferably wherein the step of determining the methylation status of the one or more CpGs in the panel comprises determining each CpG within SEQ ID NO 5760;
[0152] 18. 4.000 or more, preferably wherein the step of determining the methylation status of the one or more CpGs in the panel comprises determining each CpG within SEQ ID NO 5771;
[0153] 19. 2.000 or more, preferably wherein the step of determining the methylation status of the one or more CpGs in the panel comprises determining each CpG within SEQ ID NO 5762;
[0154] 20. 7.000 or more, preferably wherein the step of determining the methylation status of the one or more CpGs in the panel comprises determining each CpG within SEQ ID NO 5780;
[0155] 21. 6.000 or more, preferably wherein the step of determining the methylation status of the one or more CpGs in the panel comprises determining each CpG within SEQ ID NO 5776;
[0156] 22. 5.000 or more, preferably wherein the step of determining the methylation status of the one or more CpGs in the panel comprises determining each CpG within SEQ ID NO 5783;
[0157] 23. 6.000 or more, preferably wherein the step of determining the methylation status of the one or more CpGs in the panel comprises determining each CpG within SEQ ID NO 5782;
[0158] 24. 6.000 or more, preferably wherein the step of determining the methylation status of the one or more CpGs in the panel comprises determining each CpG within SEQ ID NO 5784;
[0159] 25. 5.000 or more, preferably wherein the step of determining the methylation status of the one or more CpGs in the panel comprises determining each CpG within SEQ ID NO 5777;
[0160] 26. 2.000 or more, preferably wherein the step of determining the methylation status of the one or more CpGs in the panel comprises determining each CpG within SEQ ID NO 5786;
[0161] 27. 7.000 or more, preferably wherein the step of determining the methylation status of the one or more CpGs in the panel comprises determining each CpG within SEQ ID NO 5775; or
[0162] 28. 3.000 or more, preferably wherein the step of determining the methylation status of the one or more CpGs in the panel comprises determining each CpG within SEQ ID NO 5770,
[0163] and more preferably wherein the assay comprises determining percent methylated reference for the sequence defined by the specified SEQ ID NO, the individual is subjected to one or more treatments according to their cancer index value, the one or more treatments comprise a colposcopy, and wherein the colposcopy is negative, an endometrial biopsy, and wherein the endometrial biopsy is also negative, a repeat assay according to the assays of the invention, preferably wherein the repeat assay is performed about one year after the previous assay.

[0164] The assay of the invention may be performed as above and additionally wherein the one or more treatments that the individual is subjected to are repeated on a monthly, three monthly, six monthly, yearly or two yearly basis following an initial administration.

[0165] The invention also provides a method of monitoring the CIN3 and/or cancer status of an individual according to the individual's cancer index value, the method comprising: (a) assessing the presence, absence or development of CIN3 and/or cancer in an individual by performing the assay according to any one of the assays of the invention at a first time point; (b) assessing the presence, absence or development of CIN3 and/or cancer in the individual by performing the assay according to any one of the assays of the invention at one or more further time points; and (c) monitoring any change in cancer index value and/or the CIN3 and/or cancer status of the individual between time points.

[0166] The method of the invention may be performed as above and additionally wherein the further time points are monthly, three monthly, six monthly, yearly or two yearly basis following an initial assessment.

[0167] The method of the invention may be performed as above and additionally wherein depending on the cancer status of the individual, one or more treatments are administered to the individual according to any one of the methods of the invention, or when the cancer index value of the individual is:
[0168] 1. less than about −0.530, and preferably wherein the assay comprises determining methylation β-values for each CpG in the panel of one or more CpGs, no treatment is administered to the individual;
[0169] 2. less than about 5.000, and preferably wherein the step of determining the methylation status of the one or more CpGs in the panel comprises determining each CpG within 5768, and more preferably wherein the assay comprises determining percent methylated reference for the sequence defined by the specified SEQ ID NO, no treatment is administered to the individual;
[0170] 3. less than about 1.000, and preferably wherein the step of determining the methylation status of the one or more CpGs in the panel comprises determining each CpG within 5765, and more preferably wherein the assay comprises determining percent methylated reference for the sequence defined by the specified SEQ ID NO, no treatment is administered to the individual;
[0171] 4. less than about 2.000, and preferably wherein the step of determining the methylation status of the one or more CpGs in the panel comprises determining each CpG within 5759, and more preferably wherein the assay comprises determining percent methylated reference for the sequence defined by the specified SEQ ID NO, no treatment is administered to the individual;
[0172] 5. less than about 5.000, and preferably wherein the step of determining the methylation status of the one or more CpGs in the panel comprises determining each CpG within 5785, and more preferably wherein the assay comprises determining percent methylated reference for the sequence defined by the specified SEQ ID NO, no treatment is administered to the individual;
[0173] 6. less than about 4.000, and preferably wherein the step of determining the methylation status of the one or more CpGs in the panel comprises determining each CpG within 5763, and more preferably wherein the assay comprises determining percent methylated reference for the sequence defined by the specified SEQ ID NO, no treatment is administered to the individual;
[0174] 7. less than about 4.000, and preferably wherein the step of determining the methylation status of the one or more CpGs in the panel comprises determining each CpG within 5781, and more preferably wherein the assay comprises determining percent methylated reference for the sequence defined by the specified SEQ ID NO, no treatment is administered to the individual;
[0175] 8. less than about 1.000, and preferably wherein the step of determining the methylation status of the one or more CpGs in the panel comprises determining each CpG within 5769, and more preferably wherein the assay comprises determining percent methylated reference for the sequence defined by the specified SEQ ID NO, no treatment is administered to the individual;
[0176] 9. less than about 1.000, and preferably wherein the step of determining the methylation status of the one or more CpGs in the panel comprises determining each CpG within 5766, and more preferably wherein the assay comprises determining percent methylated reference for the sequence defined by the specified SEQ ID NO, no treatment is administered to the individual;
[0177] 10. less than about 4.000, and preferably wherein the step of determining the methylation status of the one or more CpGs in the panel comprises determining each CpG within 5761, and more preferably wherein the assay comprises determining percent methylated reference for the sequence defined by the specified SEQ ID NO, no treatment is administered to the individual;
[0178] 11. less than about 4.000, and preferably wherein the step of determining the methylation status of the one or more CpGs in the panel comprises determining each CpG within 5779, and more preferably wherein the assay comprises determining percent methylated reference for the sequence defined by the specified SEQ ID NO, no treatment is administered to the individual;
[0179] 12. less than about 4.000, and preferably wherein the step of determining the methylation status of the one or more CpGs in the panel comprises determining each CpG within 5764, and more preferably wherein the assay comprises determining percent methylated reference for the sequence defined by the specified SEQ ID NO, no treatment is administered to the individual;
[0180] 13. less than about 5.000, and preferably wherein the step of determining the methylation status of the one or more CpGs in the panel comprises determining each CpG within 5772, and more preferably wherein the assay comprises determining percent methylated reference for the sequence defined by the specified SEQ ID NO, no treatment is administered to the individual;
[0181] 14. less than about 2.000, and preferably wherein the step of determining the methylation status of the one or more CpGs in the panel comprises determining each CpG within 5773, and more preferably wherein the assay comprises determining percent methylated reference for the sequence defined by the specified SEQ ID NO, no treatment is administered to the individual;
[0182] 15. less than about 1.000, and preferably wherein the step of determining the methylation status of the one or more CpGs in the panel comprises determining each CpG within 5778, and more preferably wherein the assay comprises determining percent methylated reference for the sequence defined by the specified SEQ ID NO, no treatment is administered to the individual;
[0183] 16. less than about 5.000, and preferably wherein the step of determining the methylation status of the one or more CpGs in the panel comprises determining each CpG within 5767, and more preferably wherein the assay comprises determining percent methylated reference for the sequence defined by the specified SEQ ID NO, no treatment is administered to the individual;
[0184] 17. less than about 5.000, and preferably wherein the step of determining the methylation status of the one or more CpGs in the panel comprises determining each CpG within 5774, and more preferably wherein the assay comprises determining percent methylated reference for the sequence defined by the specified SEQ ID NO, no treatment is administered to the individual;
[0185] 18. 0.000, preferably wherein the step of determining the methylation status of the one or more CpGs in the panel comprises determining each CpG within 5760, and more preferably wherein the assay comprises determining percent methylated reference for the sequence defined by the specified SEQ ID NO, no treatment is administered to the individual;
[0186] 19. less than about 4.000, and preferably wherein the step of determining the methylation status of the one or more CpGs in the panel comprises determining each CpG within 5771, and more preferably wherein the assay comprises determining percent methylated reference for the sequence defined by the specified SEQ ID NO, no treatment is administered to the individual;
[0187] 20. less than about 2.000, and preferably wherein the step of determining the methylation status of the one or more CpGs in the panel comprises determining each CpG within 5762, and more preferably wherein the assay comprises determining percent methylated reference for the sequence defined by the specified SEQ ID NO, no treatment is administered to the individual;
[0188] 21. less than about 7.000, and preferably wherein the step of determining the methylation status of the one or more CpGs in the panel comprises determining each CpG within 5780, and more preferably wherein the assay comprises determining percent methylated reference for the sequence defined by the specified SEQ ID NO, no treatment is administered to the individual;
[0189] 22. less than about 6.000, and preferably wherein the step of determining the methylation status of the one or more CpGs in the panel comprises determining each CpG within 5776, and more preferably wherein the assay comprises determining percent methylated reference for the sequence defined by the specified SEQ ID NO, no treatment is administered to the individual;
[0190] 23. less than about 5.000, and preferably wherein the step of determining the methylation status of the one or more CpGs in the panel comprises determining each CpG within 5783, and more preferably wherein the assay comprises determining percent methylated reference for the sequence defined by the specified SEQ ID NO, no treatment is administered to the individual;
[0191] 24. less than about 6.000, and preferably wherein the step of determining the methylation status of the one or more CpGs in the panel comprises determining each CpG within 5782, and more preferably wherein the assay comprises determining percent methylated reference for the sequence defined by the specified SEQ ID NO, no treatment is administered to the individual;
[0192] 25. less than about 6.000, and preferably wherein the step of determining the methylation status of the one or more CpGs in the panel comprises determining each CpG within 5784, and more preferably wherein the assay comprises determining percent methylated reference for the sequence defined by the specified SEQ ID NO, no treatment is administered to the individual;
[0193] 26. less than about 5.000, and preferably wherein the step of determining the methylation status of the one or more CpGs in the panel comprises determining each CpG within 5777, and more preferably wherein the assay comprises determining percent methylated reference for the sequence defined by the specified SEQ ID NO, no treatment is administered to the individual;
[0194] 27. less than about 2.000, and preferably wherein the step of determining the methylation status of the one or more CpGs in the panel comprises determining each CpG within 5786, and more preferably wherein the assay comprises determining percent methylated reference for the sequence defined by the specified SEQ ID NO, no treatment is administered to the individual;
[0195] 28. less than about 7.000, and preferably wherein the step of determining the methylation status of the one or more CpGs in the panel comprises determining each CpG within 5775, and more preferably wherein the assay comprises determining percent methylated reference for the sequence defined by the specified SEQ ID NO, no treatment is administered to the individual; or
[0196] 29. less than about 3.000, and preferably wherein the step of determining the methylation status of the one or more CpGs in the panel comprises determining each CpG within 5770, and more preferably wherein the assay comprises determining percent methylated reference for the sequence defined by the specified SEQ ID NO, no treatment is administered to the individual.

[0197] The method of the invention may be performed as above and additionally wherein an increase in the cancer index value indicates a negative response to the one or more treatments.

[0198] The method of the invention may be performed as above and additionally wherein changes are made to the one or more treatments if a negative response is identified.

[0199] The method of the invention may be performed as above and additionally wherein a decrease in the cancer index value indicates a positive response to the one or more treatments.

[0200] The method of the invention may be performed as above and additionally wherein changes are made to the one or more treatments if a positive response is identified.

[0201] The assay of the invention may be performed as above and additionally wherein the sample is obtained from a tissue comprising epithelial cells, preferably wherein the sample is not obtained from ovarian or endometrial tissue.

[0202] The assay of the invention may be performed as above and additionally wherein the sample is obtained from:
[0203] 1. cervical tissue;
[0204] 2. vaginal tissue;
[0205] 3. cervicovaginal tissue;
[0206] 4. buccal tissue;
[0207] preferably wherein the sample is obtained from cervical tissue, most preferably wherein the sample is obtained from tissue from a cervical smear.

[0208] The assay of the invention may be performed as above and additionally wherein the assay is for assessing the presence, absence or development of:
[0209] 1. grade 3 cervical epithelial neoplasia (CIN3) and/or cervical cancer, particularly wherein the cervical cancer is squamous cell cancer, an adenocarcinoma or an adenosquamous carcinoma;
[0210] 2. endometrial cancer, preferably wherein the endometrial cancer is an endometriod cancer, uterine carcinosarcoma, squamous cell carcinoma, small cell carcinoma, transitional carcinoma, serous carcinoma, clear-cell carcinoma, mucinous adenocarcinoma, undifferentiated carcinoma, dedifferentiated carcinoma or serous adenocarcinoma.

[0211] The invention also provides an array capable of discriminating between methylated and non-methylated forms of CpGs; the array comprising oligonucleotide probes specific for a methylated form of each CpG in a CpG panel and oligonucleotide probes specific for a non-methylated form of each CpG in the panel; wherein the panel consists of at least 500 CpGs selected from the CpGs identified in SEQ ID NOs 1 to 5000 and identified at nucleotide positions 61 to 62, and identified in SEQ ID NOs 5001 to 5418 and denoted by CG.

[0212] The array of the invention may be performed as above and additionally provided that the array is not an Infinium MethylationEPIC BeadChip array or an Infinium HumanMethylation450, and/or provided that the number of CpG-specific oligonucleotide probes of the array is 482,000 or less, 480,000 or less, 450,000 or less, 440,000 or less, 430,000 or less, 420,000 or less, 410,000 or less, or 400,000 or less.

[0213] The array of the invention may be performed as above and additionally wherein the panel comprises any panel of CpGs defined in the assays of any one of the assays of the invention.

[0214] The array of the invention may be performed as above and additionally further comprising one or more oligonucleotides comprising any set of CpGs defined in the assays of any one of the assays of the invention, wherein the one or more oligonucleotides are hybridized to corresponding oligonucleotide probes of the array.

[0215] The invention also provides a hybridized array, wherein the array is obtainable by hybridizing to an array according to any one of the arrays of the invention a group of oligonucleotides comprising any panel of CpGs defined in the assays of any one of the assays of the invention.

[0216] The invention also provides a process for making the hybridized array according to the hybridised array of the invention, comprising contacting an array according to any one of the arrays of the invention with a group of oligonucleotides comprising any panel of CpGs defined in any one of the assays of the invention.

### BRIEF DESCRIPTION OF THE FIGURES

[0217] FIG. 1 shows the experimental design underpinning the discovery and validation of the WID-CIN-index.

[0218] FIG. 2 shows (A) distribution of the WID-CIN-index in the diagnostic validation set with cutoffs corresponding to 90% (dashed) and 75% specificity (dotted). (B) receiver operating characteristic (ROC) curve corresponding to the diagnostic validation set with separate curves for women >30 years and ≤30 years of age. (C) distribution of the WID-CIN-index in CIN1 and CIN2 cases as part of the diagnostic validation set with 90% (dashed) and 75% (dotted) specificity cutoffs.

[0219] FIG. 3 shows (A) dependence of the WID-CIN-index in HPV+ control samples on biobank storage time. (B) the WID-CIN-index in the predictive validation set consisting of HPV-positive and cytology-negative samples taken 1-4 years prior to either a diagnosis with CIN3+(red points) or censoring (blue points). (C) ROC curve corresponding to the predictive validation set.

[0220] FIG. 4 shows (A) distribution of the WID-CIN-index in the endometrial diagnostic validation set consisting of samples from healthy controls and women with endometrial cancer. (B) ROC curve corresponding to the endometrial diagnostic validation set.

[0221] FIG. 5 shows CIN3+ true positive rate (TPR) and CIN1/2 true negative rate (TNR) corresponding to a) 100% sensitivity to detect CIN3+ cases in all cytology positive samples and b) 75% sensitivity to detect CIN3+ cases in all HPV+ samples. Based on the diagnostic validation datasets. Separate cutoffs for women <30 and ≥30 years of age are included.

[0222] FIG. 6 shows (A) cell-type composition in the combined discovery and diagnostic validation sets as determined by the hEpiDISH algorithm. (B) distribution of pvalues after comparing HPV+ controls to CIN3+ cases in the discovery set (based on a linear regression model with adjustment for age and immunce cell proportion). (C) distribution of the estimated epithelial and immune delta-betas. (D) performance of ridge and lasso classifiers based on out-of-bag estimates from 10-fold cross validation on the discovery set. (E) odds ratios when comparing the genomic annotation of the 5,000 CpGs comprising the WID-CIN-index to the 777,005 CpGs that were used in the analysis.

[0223] FIG. 7 shows (A) dependence of the WID-CIN-index on immune cell proportion in the HPV+ controls and CIN3+ cases from the discovery set. (B) dependence of the WID-CIN-index on age in the HPV+ controls and CIN3+ cases from the discovery set. (C) ROC curve corresponding to the performance of the WID-CIN-index in HPV− controls and CIN3+ cases from the discovery set.

[0224] FIG. 8 shows (A) the cell-type composition of samples from the predictive validation set based on the hEpiDISH algorithm. (B) dependence of the WID-CIN-index on age in the HPV+ controls and CIN3+ cases from the predictive validation set.

[0225] FIG. 9 shows (A) the island subcomponent of the WID-CIN-index as a function of immune cell proportion in the diagnostic validation set. (B) ROC curve corresponding to the island subcomponent of the WID-CIN-index in the diagnostic validation set. (C) the island subcomponent of the WID-CIN-index as a function of immune cell proportion in the predictive validation set. (D) ROC curve corresponding to the island subcomponent of the WID-CIN-index in the predictive validation set. (E) the open-sea subcomponent of the WID-CIN-index as a function of immune cell proportion in the diagnostic validation set. (F) ROC curve corresponding to the open-sea subcomponent of the WID-CIN-index in the diagnostic validation set. (G) the open-sea subcomponent of the WID-CIN-index as a function of immune cell proportion in the predictive validation set. (H) ROC curve corresponding to the open-sea subcomponent of the WID-CIN-index in the predictive validation set.

[0226] FIG. 10 shows (A) the cell-type composition of samples from the endometrial diagnostic validation set based on the hEpiDISH algorithm. (B) dependence of the WID-CIN-index on age in the HPV+ controls and CIN3+ cases from the endometrial diagnostic validation set.

[0227] FIG. 11 shows cutpoints applied to the patient data, and consequent specificity and sensitivity for CIN3 status discrimination achieved when these cutpoints are applied.

### DETAILED DESCRIPTION OF THE INVENTION

### Identification of CpGs

[0228] The present inventors sought to identify CpG methylation-based assays capable of assessing the presence, absence or development of CIN3 and/or cancer, particularly cervical or endometrial cancer, most preferably cervical cancer, in an individual. Any of the assays described herein for assessing the presence, absence or development of CIN3 and/or cancer, particularly cervical or endometrial cancer, most preferably cervical cancer, in an individual are capable of being utilised for assessing the presence, absence or development of cervical cancer and/or endometrial cancer, particularly cervical cancer. The present inventors compared CpG methylation levels in non-cancerous epithelial cells, particularly be derived from the cervix, the vagina, the buccal area, blood and/or urine, preferably derived from a cervical liquid-based cytology sample, and more preferably a cervical smear sample across groups of women that were either known to be both cervical and endometrial cancer negative, or known to be cervical and/or endometrial cancer positive. This led to the surprising establishment of a “cancer index”, used interchangeable herein with “index”, “index value”, “WID-CIN-Index” or “WID-Index” (WID=women's risk identification).

[0229] A CpG as defined herein refers to the CG dinucleotide motif identified in relation to each SEQ ID NO., wherein the CG dinucleotide of interest is denoted by CG and by [[CG]]. Thus by determining the methylation status of any panel of one or more CpGs defined by or identified in a given SEQ ID NO, it is meant that a determination is made as to the methylation status of the cytosine of the CG dinucleotide motif identified in square brackets in the panel of one or more CpGs in each sequence shown below, accepting that variations in the sequence upstream and downstream of any given CpG may exist due to sequencing errors or variation between individuals.

[0230] As set out in more detail in the Examples, the methylation status of sub-selections of the 5000 CpGs, as identified in SEQ ID NOs 1 to 5000, may be determined in order to assess an individual for the presence, absence or development of CIN3 and/or cancer, particularly cervical or endometrial cancer, most preferably cervical cancer, with high sensitivity and specificity. A panel of one or more of the CpGs identified in SEQ ID NOs 1 to 5000 may be utilised to derive a cancer index for an individual in accordance with the invention described herein.

[0231] The methylation status of a panel of one or more CpGs of the 5000 CpGs defined according to SEQ ID NOs: 1 to 5000 may be assessed by any suitable technique. As explained in more detail in the Examples below, one particular exemplary technique which the inventors have used is an array-based analysis technique coupled with beta value analysis. SEQ ID NOs 1 to 5000 correspond to the sequences of commercial probes utilised in said array.

[0232] The inventors further identified 418 differentially methylated regions (DMRs) with relevance to CIN3 and cancer, particularly cervical or endometrial cancer. The nucleotide sequences of the 418 DMRs are defined respectively by the nucleotide sequences of SEQ ID NO: 5001 to 5418 as set out in Table 1 below, accepting that variation in the nucleotide sequence of any given DMR may exist due to sequencing errors and/or variation between individuals. In each of the sequences corresponding to SEQ ID NO: 5001 to 5418, the cytosine of the CG dinucleotide motif identified in square brackets or double square brackets is a cytosine of a CpG which may be included in a panel of CpGs when performing the assays of the invention.

[0233] The inventors further defined 28 regions within a select number of the 418 DMRs with particular relevance to CIN3 and cancer, particularly cervical or endometrial cancer. The nucleotide sequences of the 28 regions are defined respectively by the nucleotide sequences of SEQ ID NOs: 5703 to 5786 as set out in Table 2 below, accepting that variation in the nucleotide sequence of any given DMR may exist due to sequencing errors and/or variation between individuals. When any one or more of the 28 regions are included in a panel of CpGs when performing the assays of the invention, the methylation status of every cytosine within a CG dinucleotide in the region is determined. The amplicon sequences generated by the 28 primer and probe reactions as set out Table 2 are described and defined by SEQ ID NOs 5787 to 5814 and in Table 12. In any of the assays described herein, the step of determining the methylation status of a panel of one or more CpGs may comprise determining the methylation status of one or more CpGs within any one or more the amplicons defined by SEQ ID NOs 5787 to 5814 and denoted by CG. More preferably, in any of the assays described herein, the step of determining the methylation status of a panel of one or more CpGs may comprise determining the methylation status of one or more CpGs within any one or more the amplicons defined by SEQ ID NOs 5787, 5790, 5797, 5807 and 5789, although more preferably 5787, 5790, 5797, and denoted by CG. Yet more preferably, in any of the assays described herein, the step of determining the methylation status of a panel of one or more CpGs may comprise determining the methylation status of all of the CpGs denoted by CG in the amplicons defined by SEQ ID NOs 5787, 5790, 5797, 5807 and 5789, although more preferably 5787, 5790, 5797.

TABLE 1
The nucleotide sequences of the 418 DMRs are
defined respectively by the nucleotide
sequences of SEQ ID NO: 5001 to 5418.

SEQ ID NO: 5001
C[CG]T[CG]C[CG]CT[CG]CCCTTGGC[CG][CG]CCAGC[CG
]CAGGGTCCT[CG]G[CG]CC[CG]GGGG[CG]GCAGCAGGTTGG
AG[CG]CAC[CG]TG[CG][CG]TCCTGCCCTCT[CG]G[CG]CC
TC[CG]C[CG]TCC[CG]GAGGCC[CG]GGCTCCT[CG]GTCCC[
CG]C[CG]GCTCC[CG]CTCCATGGC[CG][CG]TGT[CG]C[CG
][CG]CC[CG]GCTCCTC[CG]C[CG]CTCA[CG]CC[CG]CC[C
G][CG]C[CG]GCCTCTTAGGTTATCATCACT[CG][CG]GCC[C
G]GG[CG][CG]G[CG]GTG[CG]AGCTCCC[CG]CCTG[CG]GG
A[CG]CA[CG]GAGAC[CG][CG]GTCAG[CG][CG]C[CG]CCT
GGC[[CG]]GCCCAG[CG][CG]CCCAGCC[CG][CG]CCCAGCC
C[CG]TCCACTCC[CG]TCCAGCCC[CG]C[CG]CC[CG]GC[CG
]CAGTCCCCAGGG[CG]CAAGCTGGG[CG]GGTGC[CG]CACAGA
GCCCCCTTGTCCT[CG]C[CG]CC[CG]CCCC[CG]GCC[CG]GG
T[CG]TTTC[CG]C[CG][CG]GTGGCCA[CG]GCCC[CG]CCCT
[CG]TTC[CG][CG]CC[CG]GACTGGGCCA[CG]C[CG]GATAG
[CG]GGAAACAAAAAAAGCC[CG]AGCTGGAAACTTCAGAGAGGT
TTAGTTT[[CG]]TTTCCCAGAAGCATCAGTT[[CG]]GTCCCAA
AA[[CG]]CTGCAAA[[CG]][CG][CG]CT
SEQ ID NO: 5002
T[CG]CCCTTGGC[CG][CG]CCAGC[CG]CAGGGTCCT[CG]G[
CG]CC[CG]GGGG[CG]GCAGCAGGTTGGAG[CG]CAC[CG]TG[
CG][CG]TCCTGCCCTCT[CG]G[CG]CCTC[CG]C[CG]TCC[C
G]GAGGCC[CG]GGCTCCT[CG]GTCCC[CG]C[CG]GCTCC[CG]
CTCCATGGC[CG][CG]TGT[CG]C[CG][CG]CC[CG]GCTCCT
C[CG]C[CG]CTCA[CG]CC[CG]CC[CG][CG]C[CG]GCCTCT
TAGGTTATCATCACT[CG][CG]GCC[CG]GG[CG][CG]G[CG]
GTG[CG]AGCTCCC[CG]CCTG[CG]GGA[CG]CA[CG]GAGAC[
CG][CG]GTCAG[CG][CG]C[CG]CCTGGC[CG]GCCCAG[[CG
]][[CG]]CCCAGCC[[CG]][[CG]]CCCAGCCC[CG]TCCACT
CC[CG]TCCAGCCC[CG]C[CG]CC[CG]GC[CG]CAGTCCCCAG
GG[CG]CAAGCTGGG[CG]GGTGC[CG]CACAGAGCCCCCTTGTC
CT[CG]C[CG]CC[CG]CCCC[CG]GCC[CG]GGT[CG]TTTC[C
G]C[CG][CG]GTGGCCA[CG]GCCC[CG]CCCT[CG]TTC[CG]
[CG]CC[CG]GACTGGGCCA[CG]C[CG]GATAG[CG]GGAAACA
AAAAAAGCC[CG]AGCTGGAAACTTCAGAGAGGTTTAGTTT[CG]
TTTCCCAGAAGCATCAGTT[[CG]]GTCCCAAAA[CG]CTGCAAA
[CG][CG][CG]CTGCCTGCAGTA
SEQ ID NO: 5003
GC[CG][CG]CCAGC[CG]CAGGGTCCT[CG]G[CG]CC[CG]GG
GG[CG]GCAGCAGGTTGGAG[CG]CAC[CG]TG[CG][CG]TCCT
GCCCTCT[CG]G[CG]CCTC[CG]C[CG]TCC[CG]GAGGCC[CG
]GGCTCCT[CG]GTCCC[CG]C[CG]GCTCC[CG]CTCCATGGC[
CG][CG]TGT[CG]C[CG][CG]CC[CG]GCTCCTC[CG]C[CG]
CTCA[CG]CC[CG]CC[CG][CG]C[CG]GCCTCTTAGGTTATCA
TCACT[CG][CG]GCC[CG]GG[CG][CG]G[CG]GTG[CG]AGC
TCCC[CG]CCTG[CG]GGA[CG]CA[CG]GAGAC[CG][CG]GTC
AG[CG][CG]C[CG]CCTGGC[CG]GCCCAG[CG][CG]CCCAGC
C[[CG]][[CG]]CCCAGCCC[CG]TCCACTCC[CG]TCCAGCCC
[CG]C[CG]CC[CG]GC[CG]CAGTCCCCAGGG[CG]CAAGCTGG
G[CG]GGTGC[CG]CACAGAGCCCCCTTGTCCT[CG]C[CG]CC[
CG]CCCC[CG]GCC[CG]GGT[CG]TTTC[CG]C[CG][CG]GTG
GCCA[CG]GCCC[CG]CCCT[CG]TTC[CG][CG]CC[CG]GACT
GGGCCA[CG]C[CG]GATAG[CG]GGAAACAAAAAAAGCC[CG]A
GCTGGAAACTTCAGAGAGGTTTAGTTT[[CG]]TTTCCCAGAAGC
ATCAGTT[[CG]]GTCCCAAAA[[CG]]CTGCAAA[CG][CG][C
G]CTGCCTGCAGTAGGAGAGAGG
SEQ ID NO: 5004
GCT[CG]CCCTTGGC[CG][CG]CCAGC[CG]CAGGGTCCT[CG]
G[CG]CC[CG]GGGG[CG]GCAGCAGGTTGGAG[CG]CAC[CG]T
G[CG][CG]TCCTGCCCTCT[CG]G[CG]CCTC[CG]C[CG]TCC
[CG]GAGGCC[CG]GGCTCCT[CG]GTCCC[CG]C[CG]GCTCC[
CG]CTCCATGGC[CG][CG]TGT[CG]C[CG][CG]CC[CG]GCT
CCTC[CG]C[CG]CTCA[CG]CC[CG]CC[CG][CG]C[CG]GCC
TCTTAGGTTATCATCACT[CG][CG]GCC[CG]GG[CG][CG]G[
CG]GTG[CG]AGCTCCC[CG]CCTG[CG]GGA[CG]CA[CG]GAG
AC[CG][CG]GTCAG[CG][CG]C[CG]CCTGGC[CG]GCCCAG[
[CG]][[CG]]CCCAGCC[CG][CG]CCCAGCCC[CG]TCCACTC
C[CG]TCCAGCCC[CG]C[CG]CC[CG]GC[CG]CAGTCCCCAGG
G[CG]CAAGCTGGG[CG]GGTGC[CG]CACAGAGCCCCCTTGTCC
T[CG]C[CG]CC[CG]CCCC[CG]GCC[CG]GGT[CG]TTTC[CG
]C[CG][CG]GTGGCCA[CG]GCCC[CG]CCCT[CG]TTC[CG][
CG]CC[CG]GACTGGGCCA[CG]C[CG]GATAG[CG]GGAAACAA
AAAAAGCC[CG]AGCTGGAAACTTCAGAGAGGTTTAGTTT[CG]T
TTCCCAGAAGCATCAGTT[CG]GTCCCAAAA[CG]CTGCAAA[CG
][CG][CG]CTGCCTGCAG
SEQ ID NO: 5005
[CG][CG]CCAGC[CG]CAGGGTCCT[CG]G[CG]CC[CG]GGGG
[CG]GCAGCAGGTTGGAG[CG]CAC[CG]TG[CG][CG]TCCTGC
CCTCT[CG]G[CG]CCTC[CG]C[CG]TCC[CG]GAGGCC[CG]G
GCTCCT[CG]GTCCC[CG]C[CG]GCTCC[CG]CTCCATGGC[CG
][CG]TGT[CG]C[CG][CG]CC[CG]GCTCCTC[CG]C[CG]CT
CA[CG]CC[CG]CC[CG][CG]C[CG]GCCTCTTAGGTTATCATC
ACT[CG][CG]GCC[CG]GG[CG][CG]G[CG]GTG[CG]AGCTC
CC[CG]CCTG[CG]GGA[CG]CA[CG]GAGAC[CG][CG]GTCAG
[CG][CG]C[CG]CCTGGC[CG]GCCCAG[CG][CG]CCCAGCC[
[CG]][[CG]]CCCAGCCC[CG]TCCACTCC[CG]TCCAGCCC[C
G]C[CG]CC[CG]GC[CG]CAGTCCCCAGGG[CG]CAAGCTGGG[
CG]GGTGC[CG]CACAGAGCCCCCTTGTCCT[CG]C[CG]CC[CG
]CCCC[CG]GCC[CG]GGT[CG]TTTC[CG]C[CG][CG]GTGGC
CA[CG]GCCC[CG]CCCT[CG]TTC[CG][CG]CC[CG]GACTGG
GCCA[CG]C[CG]GATAG[CG]GGAAACAAAAAAAGCC[[CG]]A
GCTGGAAACTTCAGAGAGGTTTAGTTT[CG]TTTCCCAGAAGCAT
CAGTT[[CG]]GTCCCAAAA[[CG]]CTGCAAA[[CG]][CG][C
G]CTGCCTGCAGTAGGAGAGAGGAA
SEQ ID NO: 5006
TTTTCACCATTTTACAGT[CG]AAGAAGGGAAGATAAGAGG[CG]
GTGAATC[CG]AGACTTTCATTCAGGTGA[CG]ATCCCT[CG][C
G]GGCACTCACTCT[CG]CTCACACTACAATCAGATCCTCCATG[
CG]GCTTTCATATACTCTGTCACACT[CG]CAGCCAGAATCCCCT
[CG]GATGGACTCTTGCAAACCTCCAGCCCCATCC[CG]GGATC[
CG]TG[CG]TCTTCTACAGCCACCACTTGGGCCAG[CG]TCCAGG
A[CG]CCCAAG[CG]TAACCTCCCCACTCTAAAC[CG]TTAGGAA
TCAGTGGCTGGACTCAC[CG][CG]TCATAAAAGCATAAACTGTG
ACC[CG]ATGAGTC[CG][CG]CACT[CG]GAAAACAAGAGAA[C
G]CTCCCA[CG]TCTC[CG]GG[CG]CAGCTTGTGCCAG[CG]AC
TACTAGGTCAGGGGG[CG]CAGCTGAGAGAATTCAAGCAACCTCC
C[CG]CAAC[CG]GTTC[CG]C[CG][CG]TTTGTGGGCTGGTAG
CC[CG]GAATACATTTCCCAGAGGCCTT[CG][CG]GC[[CG]]A
[CG]TGCTT[CG][CG]CAGGAA[CG]CAGC[CG]CCTCC[CG]A
CTGGAGGA[CG][CG]GTAG[CG]GAGCTGCTCAAAG[CG]AGGT
GCTCAGCCCTGGGAGGCTCAGGG
SEQ ID NO: 5007
TT[CG]TTGATATTTGTGCTCACTTATTAG[CG]GTAAATTATTA
ATTTTAGATAAGCCCATCACAGAGTGAAGGCTCAATCCTTGAACA
GCCCAGGGAGAACTT[CG]TTGCTACTTTTGAAAAGCCCTTTGAT
GTGCCCAAAGTCTCCAGAAGGG[CG]ATGCCAAACCCACTCAACT
TTGACAAAGTGTGAAA[[CG]]TCTGTAAAAAGGAGTTCTCTGAT
GTGTGAGAGGAGA[[CG]]GAAC[CG]AGAAGAAAAGGC[[CG]]
TACTCTGCCCCC[CG][CG]GGACCCAGGTCCC[CG]CCTGCTGC
AGAG[CG]CACTCTG[[CG]]CA[[CG]]T[[CG]]AGC[CG][C
G]AAAGGTTCACAGAAGAAAACAAGAGAAAGAAGTAGCAGGCACT
GAGGAGC[CG]C[CG]G[CG]C[CG]G[CG]CCCAGGA[CG]GCA
[CG]TGACC[CG]GGGG[CG]GGGC[CG][CG][CG]GGC[CG][
CG]GGCCAGTGGATGGGGA[CG]GGGG[CG]GGGC[CG][CG]GC
T[CG]GGGGG[CG]GGGTCTGTGG[CG]G[CG]CAGCTTACAC[C
G][CG]GTCCCCTTATTTGGATCTG[CG]GGAATGTGGGCTGGAG
AGGTCCTGC[CG]TGGTACCAGCCTCCAGCCTGCCCCCAGGACTG
CCCCTGACCCAGG[CG][CG]CC[CG]CT
SEQ ID NO: 5008
TGTGCTCACTTATTAG[CG]GTAAATTATTAATTTTAGATAAGCC
CATCACAGAGTGAAGGCTCAATCCTTGAACAGCCCAGGGAGAACT
T[CG]TTGCTACTTTTGAAAAGCCCTTTGATGTGCCCAAAGTCTC
CAGAAGGG[CG]ATGCCAAACCCACTCAACTTTGACAAAGTGTGA
AA[[CG]]TCTGTAAAAAGGAGTTCTCTGATGTGTGAGAGGAGA[
[CG]]GAAC[CG]AGAAGAAAAGGC[[CG]]TACTCTGCCCCC[C
G][CG]GGACCCAGGTCCC[CG]CCTGCTGCAGAG[CG]CACTCT
G[[CG]]CA[[CG]]T[[CG]]AGC[[CG]][[CG]]AAAGGTTC
ACAGAAGAAAACAAGAGAAAGAAGTAGCAGGCACTGAGGAGC[CG
]C[CG]G[CG]C[CG]G[CG]CCCAGGA[CG]GCA[CG]TGACC[
CG]GGGG[CG]GGGC[CG][CG][CG]GGC[CG][CG]GGCCAGT
GGATGGGGA[CG]GGGG[CG]GGGC[CG][CG]GCT[CG]GGGGG
[CG]GGGTCTGTGG[CG]G[CG]CAGCTTACAC[CG][CG]GTCC
CCTTATTTGGATCTG[CG]GGAATGTGGGCTGGAGAGGTCCTGC[
CG]TGGTACCAGCCTCCAGCCTGCCCCCAGGACTGCCCCTGACCC
AGG[CG][CG]CC[CG]CTGCT[CG]GTGGCAG
SEQ ID NO: 5009
ATATTTGTGCTCACTTATTAG[CG]GTAAATTATTAATTTTAGAT
AAGCCCATCACAGAGTGAAGGCTCAATCCTTGAACAGCCCAGGGA
GAACTT[CG]TTGCTACTTTTGAAAAGCCCTTTGATGTGCCCAAA
GTCTCCAGAAGGG[CG]ATGCCAAACCCACTCAACTTTGACAAAG
TGTGAAA[[CG]]TCTGTAAAAAGGAGTTCTCTGATGTGTGAGAG
GAGA[[CG]]GAAC[CG]AGAAGAAAAGGC[[CG]]TACTCTGCC
CCC[CG][CG]GGACCCAGGTCCC[CG]CCTGCTGCAGAG[CG]C
ACTCTG[[CG]]CA[[CG]]T[[CG]]AGC[CG][[CG]]AAAGG
TTCACAGAAGAAAACAAGAGAAAGAAGTAGCAGGCACTGAGGAGC
[CG]C[CG]G[CG]C[CG]G[CG]CCCAGGA[CG]GCA[CG]TGA
CC[CG]GGGG[CG]GGGC[CG][CG][CG]GGC[CG][CG]GGCC
AGTGGATGGGGA[CG]GGGG[CG]GGGC[CG][CG]GCT[CG]GG
GGG[CG]GGGTCTGTGG[CG]G[CG]CAGCTTACAC[CG][CG]G
TCCCCTTATTTGGATCTG[[CG]]GGAATGTGGGCTGGAGAGGTC
CTGC[CG]TGGTACCAGCCTCCAGCCTGCCCCCAGGACTGCCCCT
GACCCAGG[CG][CG]CC[CG]CTGCT[CG]GT
SEQ ID NO: 5010
TGCTCACTTATTAG[CG]GTAAATTATTAATTTTAGATAAGCCCA
TCACAGAGTGAAGGCTCAATCCTTGAACAGCCCAGGGAGAACTT[
CG]TTGCTACTTTTGAAAAGCCCTTTGATGTGCCCAAAGTCTCCA
GAAGGG[CG]ATGCCAAACCCACTCAACTTTGACAAAGTGTGAAA
[[CG]]TCTGTAAAAAGGAGTTCTCTGATGTGTGAGAGGAGA[[C
G]]GAAC[CG]AGAAGAAAAGGC[[CG]]TACTCTGCCCCC[CG]
[CG]GGACCCAGGTCCC[CG]CCTGCTGCAGAG[CG]CACTCTG[
[CG]]CA[[CG]]T[[CG]]AGC[[CG]][[CG]]AAAGGTTCAC
AGAAGAAAACAAGAGAAAGAAGTAGCAGGCACTGAGGAGC[CG]C
[CG]G[CG]C[CG]G[CG]CCCAGGA[CG]GCA[CG]TGACC[CG
]GGGG[CG]GGGC[CG][CG][CG]GGC[CG][CG]GGCCAGTGG
ATGGGGA[CG]GGGG[CG]GGGC[CG][CG]GCT[CG]GGGGG[C
G]GGGTCTGTGG[CG]G[CG]CAGCTTACAC[CG][CG]GTCCCC
TTATTTGGATCTG[[CG]]GGAATGTGGGCTGGAGAGGTCCTGC[
CG]TGGTACCAGCCTCCAGCCTGCCCCCAGGACTGCCCCTGACCC
AGG[CG][CG]CC[CG]CTGCT[CG]GTGGCAGGA
SEQ ID NO: 5011
TTGATATTTGTGCTCACTTATTAG[CG]GTAAATTATTAATTTTA
GATAAGCCCATCACAGAGTGAAGGCTCAATCCTTGAACAGCCCAG
GGAGAACTT[CG]TTGCTACTTTTGAAAAGCCCTTTGATGTGCCC
AAAGTCTCCAGAAGGG[CG]ATGCCAAACCCACTCAACTTTGACA
AAGTGTGAAA[[CG]]TCTGTAAAAAGGAGTTCTCTGATGTGTGA
GAGGAGA[[CG]]GAAC[CG]AGAAGAAAAGGC[[CG]]TACTCT
GCCCCC[CG][CG]GGACCCAGGTCCC[CG]CCTGCTGCAGAG[C
G]CACTCTG[[CG]]CA[[CG]]T[[CG]]AGC[[CG]][[CG]]
AAAGGTTCACAGAAGAAAACAAGAGAAAGAAGTAGCAGGCACTGA
GGAGC[CG]C[CG]G[CG]C[CG]G[CG]CCCAGGA[CG]GCA[C
G]TGACC[CG]GGGG[CG]GGGC[CG][CG][CG]GGC[CG][CG
]GGCCAGTGGATGGGGA[CG]GGGG[CG]GGGC[CG][CG]GCT[
CG]GGGGG[CG]GGGTCTGTGG[CG]G[CG]CAGCTTACAC[CG]
[CG]GTCCCCTTATTTGGATCTG[[CG]]GGAATGTGGGCTGGAG
AGGTCCTGC[CG]TGGTACCAGCCTCCAGCCTGCCCCCAGGACTG
CCCCTGACCCAGG[CG][CG]CC[CG]CTGCTC
SEQ ID NO: 5012
TGTACACACACACAAAATATACCATACAGAGTGTAAGGTTCATGA
[CG]TCTTTCTTT[CG]TTGATATTTGTGCTCACTTATTAG[CG]
GTAAATTATTAATTTTAGATAAGCCCATCACAGAGTGAAGGCTCA
ATCCTTGAACAGCCCAGGGAGAACTT[CG]TTGCTACTTTTGAAA
AGCCCTTTGATGTGCCCAAAGTCTCCAGAAGGG[CG]ATGCCAAA
CCCACTCAACTTTGACAAAGTGTGAAA[[CG]]TCTGTAAAAAGG
AGTTCTCTGATGTGTGAGAGGAGA[[CG]]GAAC[CG]AGAAGAA
AAGGC[CG]TACTCTGCCCCC[CG][CG]GGACCCAGGTCCC[CG
]CCTGCTGCAGAG[CG]CACTCTG[[CG]]CA[[CG]]T[[CG]]
AGC[CG][CG]AAAGGTTCACAGAAGAAAACAAGAGAAAGAAGTA
GCAGGCACTGAGGAGC[CG]C[CG]G[CG]C[CG]G[CG]CCCAG
GA[CG]GCA[CG]TGACC[CG]GGGG[CG]GGGC[CG][CG][CG
]GGC[CG][CG]GGCCAGTGGATGGGGA[CG]GGGG[CG]GGGC[
CG][CG]GCT[CG]GGGGG[CG]GGGTCTGTGG[CG]G[CG]CAG
CTTACAC[CG][CG]GTCCCCTTATTTGGATCTG[[CG]]GGAAT
GTGGGCTGGAGAGGTCCTGC[CG]T
SEQ ID NO: 5013
ATACATGTATATGTAAAATATGTACACACACACAAAATATACCAT
ACAGAGTGTAAGGTTCATGA[CG]TCTTTCTTT[CG]TTGATATT
TGTGCTCACTTATTAG[CG]GTAAATTATTAATTTTAGATAAGCC
CATCACAGAGTGAAGGCTCAATCCTTGAACAGCCCAGGGAGAACT
T[CG]TTGCTACTTTTGAAAAGCCCTTTGATGTGCCCAAAGTCTC
CAGAAGGG[CG]ATGCCAAACCCACTCAACTTTGACAAAGTGTGA
AA[[CG]]TCTGTAAAAAGGAGTTCTCTGATGTGTGAGAGGAGA[
[CG]]GAAC[CG]AGAAGAAAAGGC[[CG]]TACTCTGCCCCC[C
G][CG]GGACCCAGGTCCC[CG]CCTGCTGCAGAG[CG]CACTCT
G[[CG]]CA[[CG]]T[[CG]]AGC[CG][CG]AAAGGTTCACAG
AAGAAAACAAGAGAAAGAAGTAGCAGGCACTGAGGAGC[CG]C[C
G]G[CG]C[CG]G[CG]CCCAGGA[CG]GCA[CG]TGACC[CG]G
GGG[CG]GGGC[CG][CG][CG]GGC[CG][CG]GGCCAGTGGAT
GGGGA[CG]GGGG[CG]GGGC[CG][CG]GCT[CG]GGGGG[CG]
GGGTCTGTGG[CG]G[CG]CAGCTTACAC[CG][CG]GTCCCCTT
ATTTGGATCTG[[CG]]GGAATGTG
SEQ ID NO: 5014
C[CG]GAGGAT[CG]CACT[CG]CTCATCCTTACACACCACACAC
ACACACACACACACACACACACACACACTGC[CG]CTAG[CG]CC
CCCCA[CG]CCACAAGC[CG]GAATG[CG]GAGGTCAGAGCCACT
GTCCACTTGAAAGCAGGAAAGCAGGGGCTGAAA[CG]CTGAGATG
GAGG[CG]GAGGCTCTGGCCTCATCTG[CG]AGGTT[CG]CACCT
TCC[CG]GAAGGCCCCCCCCTCCCC[CG][CG]TTTCCCCAGGG[
CG]AGCAAGGTCTAGCTTCTGAGACTC[CG]CTCTCTGGGCTAG[
CG]GTT[CG]AGCTGCAGGGGGG[[CG]]GGGA[CG]GATT[CG]
GAGGGAGCACTAGAGAGAGAGCC[CG][CG]CTCACTCCTGCCCT
CCT[CG]CAAAGAACTGGCCAGCCCCACT[CG][CG]TCCAGCCC
ACAACTAGGCTGC[CG]GGAC[CG]GGGAGCCAGACCCCAGGT[C
G]CTCCAACTC[CG]G[CG]AGGG[CG]GGGAGGGGAGTGACAGC
AGCAACTAG[CG][CG][CG]CTGGCAAAAGCACAGAGTCT[[CG
]]GAATAGGCTAAA[CG]GC[CG]G[CG][CG]GAGGGGTGGAGG
CAAGAGGGGG[CG]GAGGAGGAGTTGCC[CG]AG[CG]GAGAGGG
ATGA[CG]TCCTCCAGGGC
SEQ ID NO: 5015
CCCAGTCCCAGAACCTCCACCCCTTT[CG]AATTCTTCCCAA[CG
]GGCTGACCCTGCC[CG]G[CG]CCCAGGAG[CG]CCCTGGGTAT
CTCCTGGCTGCTCTCC[CG]AATCCTTG[CG][CG]C[CG][CG]
CCCCTACCAGGTTCACTGGGTGCA[CG]TAGC[CG]TTCTCATAG
[CG]GTCCTCCTGCAACAGCTGC[CG]CAGGTGAG[CG]ATGTAA
CTGGAAGCCAGC[CG]GAG[CG]TGTCCAGCTTGGAGAGCTTAGT
GT[CG]GGGGGCACCCAGGGCAGGCTGGTCTTGAGCCTGGAGAAG
GCTTTGCTCAGCA[CG][CG]CATC[CG]GGCA[CG]CTCA[CG]
GG[CG]TTGGC[CG][CG]TTC[CG]CTG[CG]ACTGCTTGCACT
CTG[CG]GCTGAGCCCTTGGC[CG]GGAGGGGCTTCTTGCCACCA
C[CG]CC[CG][CG]CTACCACCTG[CG]C[CG]C[CG]CCCCCA
GCCACA[CG]GGGC[CG]CTTCCTCTTGCAGCCTTC[CG][CG]C
TGC[CG]GCTGTGCCCAGAG[CG]CAG[CG]CTCCTCCT[CG]C[
CG]T[CG]GGGTCCTCCTCCTCTGC[CG]A[CG]AGTTGTCACTG
GG[CG]AGG[CG]TAGCTG[CG]CTCTA[CG]C[CG][CG]GAGG
GG[CG]GCCTCTTGGAGG[[CG]]GGGAC[CG]GGTACTCC
SEQ ID NO: 5016
GAATCCTTG[CG][CG]C[CG][CG]CCCCTACCAGGTTCACTGG
GTGCA[CG]TAGC[CG]TTCTCATAG[CG]GTCCTCCTGCAACAG
CTGC[CG]CAGGTGAG[CG]ATGTAACTGGAAGCCAGC[CG]GAG
[CG]TGTCCAGCTTGGAGAGCTTAGTGT[CG]GGGGGCACCCAGG
GCAGGCTGGTCTTGAGCCTGGAGAAGGCTTTGCTCAGCA[CG][C
G]CATC[[CG]]GGCA[CG]CTCA[CG]GG[CG]TTGGC[CG][C
G]TTC[CG]CTG[CG]ACTGCTTGCACTCTG[CG]GCTGAGCCCT
TGGC[CG]GGAGGGGCTTCTTGCCACCAC[CG]CC[CG][CG]CT
ACCACCTG[CG]C[CG]C[CG]CCCCCAGCCACA[CG]GGGC[CG
]CTTCCTCTTGCAGCCTTC[CG][CG]CTGC[CG]GCTGTGCCCA
GAG[CG]CAG[CG]CTCCTCCT[CG]C[CG]T[CG]GGGTCCTCC
TCCTCTGC[CG]A[CG]AGTTGTCACTGGG[CG]AGG[CG]TAGC
TG[CG]CTCTA[CG]C[CG][CG]GAGGGG[CG]GCCTCTTGGAG
G[[CG]]GGGAC[CG]GGTACTCC[CG]CTGCAGCCCC[CG]AAG
CTCCATCTCCTC[CG]GATCACTCAC[CG]AGCC[CG]TGGACAT
CC[CG]TTGTCCCCCTTGCCCACA[CG][CG]TCCTCTTTCCTCC
CC
SEQ ID NO: 5017
C[CG]AATCCTTG[CG][CG]C[CG][CG]CCCCTACCAGGTTCA
CTGGGTGCA[CG]TAGC[CG]TTCTCATAG[CG]GTCCTCCTGCA
ACAGCTGC[CG]CAGGTGAG[CG]ATGTAACTGGAAGCCAGC[CG
]GAG[CG]TGTCCAGCTTGGAGAGCTTAGTGT[CG]GGGGGCACC
CAGGGCAGGCTGGTCTTGAGCCTGGAGAAGGCTTTGCTCAGCA[C
G][CG]CATC[CG]GGCA[CG]CTCA[CG]GG[CG]TTGGC[CG]
[CG]TTC[CG]CTG[CG]ACTGCTTGCACTCTG[CG]GCTGAGCC
CTTGGC[CG]GGAGGGGCTTCTTGCCACCAC[CG]CC[CG][CG]
CTACCACCTG[CG]C[CG]C[CG]CCCCCAGCCACA[CG]GGGC[
CG]CTTCCTCTTGCAGCCTTC[CG][CG]CTGC[CG]GCTGTGCC
CAGAG[CG]CAG[CG]CTCCTCCT[CG]C[CG]T[CG]GGGTCCT
CCTCCTCTGC[CG]A[CG]AGTTGTCACTGGG[CG]AGG[CG]TA
GCTG[CG]CTCTA[CG]C[CG][CG]GAGGGG[CG]GCCTCTTGG
AGG[[CG]]GGGAC[CG]GGTACTCC[CG]CTGCAGCCCC[CG]A
AGCTCCATCTCCTC[CG]GATCACTCAC[CG]AGCC[CG]TGGAC
ATCC[CG]TTGTCCCCCTTGCCCACA[CG][CG]TCCTCTTTCCT
CC
SEQ ID NO: 5018
TCACT[CG][CG]GCC[CG]GG[CG][CG]G[CG]GTG[CG]AGC
TCCC[CG]CCTG[CG]GGA[CG]CA[CG]GAGAC[CG][CG]GTC
AG[CG][CG]C[CG]CCTGGC[CG]GCCCAG[CG][CG]CCCAGC
C[CG][CG]CCCAGCCC[CG]TCCACTCC[CG]TCCAGCCC[CG]
C[CG]CC[CG]GC[CG]CAGTCCCCAGGG[CG]CAAGCTGGG[CG
]GGTGC[CG]CACAGAGCCCCCTTGTCCT[CG]C[CG]CC[CG]C
CCC[CG]GCC[CG]GGT[CG]TTTC[CG]C[CG][CG]GTGGCCA
[CG]GCCC[CG]CCCT[CG]TTC[CG][CG]CC[CG]GACTGGGC
CA[CG]C[CG]GATAG[CG]GGAAACAAAAAAAGCC[[CG]]AGC
TGGAAACTTCAGAGAGGTTTAGTTT[CG]TTTCCCAGAAGCATCA
GTT[CG]GTCCCAAAA[CG]CTGCAAA[CG][CG][CG]CTGCCT
GCAGTAGGAGAGAGGAAAC[CG][CG]AAG[CG][CG]AGAAAAG
G[CG]CCCC[CG]TCCCCAAGCAGCC[CG][CG][CG]CCCTTCC
AGGGGCCAGACCTGCTCCATCCTGGA[CG]G[[CG]]AAA[CG]A
CCT[CG]GGAGACCC[[CG]]GTTAGGACCTTACTCCAGGGATCA
ACTGGAATCAAAATCCAAAGGATCCATGGCATCCAGTGCTCCAAT
TTTTAAGTCTTTTTTA[CG]CAGGAC
SEQ ID NO: 5019
CTCCC[CG]CCTG[CG]GGA[CG]CA[CG]GAGAC[CG][CG]GT
CAG[CG][CG]C[CG]CCTGGC[[CG]]GCCCAG[CG][CG]CCC
AGCC[[CG]][[CG]]CCCAGCCC[CG]TCCACTCC[CG]TCCAG
CCC[CG]C[CG]CC[CG]GC[CG]CAGTCCCCAGGG[CG]CAAGC
TGGG[CG]GGTGC[CG]CACAGAGCCCCCTTGTCCT[CG]C[CG]
CC[CG]CCCC[CG]GCC[CG]GGT[CG]TTTC[CG]C[CG][CG]
GTGGCCA[CG]GCCC[CG]CCCT[CG]TTC[CG][CG]CC[CG]G
ACTGGGCCA[CG]C[CG]GATAG[CG]GGAAACAAAAAAAGCC[[
CG]]AGCTGGAAACTTCAGAGAGGTTTAGTTT[CG]TTTCCCAGA
AGCATCAGTT[[CG]]GTCCCAAAA[[CG]]CTGCAAA[[CG]][
CG][CG]CTGCCTGCAGTAGGAGAGAGGAAAC[CG][CG]AAG[C
G][CG]AGAAAAGG[CG]CCCC[CG]TCCCCAAGCAGCC[CG][C
G][CG]CCCTTCCAGGGGCCAGACCTGCTCCATCCTGGA[CG]G[
[CG]]AAA[[CG]]ACCT[[CG]]GGAGACCC[[CG]]GTTAGGA
CCTTACTCCAGGGATCAACTGGAATCAAAATCCAAAGGATCCATG
GCATCCAGTGCTCCAATTTTTAAGTCTTTTTTA[CG]CAGGACCT
CTGCTCCTGGGGAGCCCTGGGAAGGG
SEQ ID NO: 5020
TGAGAGGAGA[[CG]]GAAC[CG]AGAAGAAAAGGC[[CG]]TAC
TCTGCCCCC[CG][CG]GGACCCAGGTCCC[CG]CCTGCTGCAGA
G[CG]CACTCTG[[CG]]CA[[CG]]T[[CG]]AGC[[CG]][[C
G]]AAAGGTTCACAGAAGAAAACAAGAGAAAGAAGTAGCAGGCAC
TGAGGAGC[CG]C[CG]G[CG]C[CG]G[CG]CCCAGGA[CG]GC
A[CG]TGACC[CG]GGGG[CG]GGGC[CG][CG][CG]GGC[CG]
[CG]GGCCAGTGGATGGGGA[CG]GGGG[CG]GGGC[CG][CG]G
CT[CG]GGGGG[CG]GGGTCTGTGG[CG]G[CG]CAGCTTACAC[
CG][CG]GTCCCCTTATTTGGATCTG[CG]GGAATGTGGGCTGGA
GAGGTCCTGC[CG]TGGTACCAGCCTCCAGCCTGCCCCCAGGACT
GCCCCTGACCCAGG[CG][CG]CC[CG]CTGCT[CG]GTGGCAGG
AGGGC[CG]G[CG]GAG[CG]CCATGGCCTGCATCCTGAAGGTAA
[CG]ACTTGGATCTGTGGCT[CG]GA[CG][CG]TGGTTGGCCAG
CCCCTTGCTGCTCAGAGGCA[CG]GAGTCAGC[[CG]][CG]GTC
CCAC[CG]CATCCTCATCTCAGTTGTCTTTTCCTGGCATTGATTT
TCTTTTTGTTCCTTTGGCAAATGCATATGGAGGGAGATTCTGAAA
CA
SEQ ID NO: 5021
GGCAACTTAAAACATGG[CG]CCC[CG]GG[CG]GGGGATTTGTG
CAAATTGG[[CG]]GAGAAGGGA[CG][CG]GGGAC[CG]AGT[C
G]CCCCTT[CG]GCCAGGGATCCCAGGGAGGCCCCCAGGC[CG]G
AGGC[CG]GGGCTCAGGCTCTG[CG][CG]C[CG]GCCCAGCCAC
TACTG[CG]C[CG][CG]G[CG]GG[CG]GAG[CG]GG[CG]GGG
GG[CG][CG]G[CG][CG]CAGGCT[CG]GCC[CG]GTGGGGGTC
C[CG]G[CG]AG[CG]GGAGGG[CG]GTTGGGGACCC[CG]GC[C
G][CG]C[CG]GG[CG][CG]GGGCT[CG]GGATT[CG]GGAGAC
[CG][CG][CG]G[CG]C[CG]AAGCCA[CG][[CG]]TCAGCCC
CACTGTCC[CG][CG][CG]CCT[CG]CCCCAGGCCT[CG]GGCT
CTTCCTC[CG]CACCT[CG]TAAAGC[CG]AGACCCCCT[CG]CA
GTCCCCCACTC[CG]AGAGG[CG]GAAAAGTTACCTGGGATCAGC
AGGGAGCC[CG]GG[CG][CG]C[CG][CG]G[CG]TGGGGACTA
GGCT[CG]GG[CG][CG][CG]TCCT[CG]G[CG]G[CG]GTG[C
G]CAGGAGACT[CG]GG[CG]TGGGGAGGAAGC[CG]CAGCCCAG
GGCTGCT[CG]C[CG]CTGTTCCCCC[CG]CCCCCTGTTGCAGGA
GACAC[CG]AGGCTC[CG][CG]GAGCTG[CG]G[[CG]]GGGGC
CCA[[CG]]
SEQ ID NO: 5022
AAGGCCCCCCCCTCCCC[CG][CG]TTTCCCCAGGG[CG]AGCAA
GGTCTAGCTTCTGAGACTC[CG]CTCTCTGGGCTAG[CG]GTT[C
G]AGCTGCAGGGGGG[CG]GGGA[CG]GATT[CG]GAGGGAGCAC
TAGAGAGAGAGCC[CG][CG]CTCACTCCTGCCCTCCT[CG]CAA
AGAACTGGCCAGCCCCACT[CG][CG]TCCAGCCCACAACTAGGC
TGC[CG]GGAC[CG]GGGAGCCAGACCCCAGGT[CG]CTCCAACT
C[CG]G[CG]AGGG[CG]GGGAGGGGAGTGACAGCAGCAACTAG[
CG][CG][CG]CTGGCAAAAGCACAGAGTCT[[CG]]GAATAGGC
TAAA[CG]GC[CG]G[CG][CG]GAGGGGTGGAGGCAAGAGGGGG
[CG]GAGGAGGAGTTGCC[CG]AG[CG]GAGAGGGATGA[CG]TC
CTCCAGGGCCTTGGGCTC[CG]AGGAAC[CG]AAGACTGGTG[CG
]CT[[CG]]C[CG]GGCCC[CG][CG]CACTAGCTCTGGGGTT[C
G]CAGAGG[CG]C[CG][CG]CC[CG]GCTTC[CG][[CG]]GCA
GCTCCAACACAG[CG][CG]CAGG[CG]GT[CG]ATCC[CG]GTC
AGCTTAAAC[CG]GG[CG]CAAGCCCTCTGTCCCCCTCAAAGCAC
CTCTCTGCT[CG]TCCCTAGTCTCCAGGTGCC[CG]TCTGA
SEQ ID NO: 5023
CAGTCTGCAACCTGGTGGCAGATGGAGATGGAACCAAGATTTACC
CTGGAAGTAGGATATTAGTCAATGGCTGTCACTGGGGTACAATGT
TCAGAA[CG]ATGCAAACAGACA[[CG]]GAGGGTTGATTCTTCT
TCAGGGAAATGGCTGGCCACTCCCTTGATTTGGGAGAAACTAAAC
TGGCCTTCT[CG]TTCCCAGTCCCAGAACCTCCACCCCTTT[CG]
AATTCTTCCCAA[CG]GGCTGACCCTGCC[CG]G[CG]CCCAGGA
G[CG]CCCTGGGTATCTCCTGGCTGCTCTCC[CG]AATCCTTG[C
G][CG]C[CG][[CG]]CCCCTACCAGGTTCACTGGGTGCA[CG]
TAGC[CG]TTCTCATAG[CG]GTCCTCCTGCAACAGCTGC[CG]C
AGGTGAG[CG]ATGTAACTGGAAGCCAGC[CG]GAG[CG]TGTCC
AGCTTGGAGAGCTTAGTGT[CG]GGGGGCACCCAGGGCAGGCTGG
TCTTGAGCCTGGAGAAGGCTTTGCTCAGCA[CG][CG]CATC[CG
]GGCA[CG]CTCA[CG]GG[CG]TTGGC[CG][CG]TTC[CG]CT
G[CG]ACTGCTTGCACTCTG[CG]GCTGAGCCCTTGGC[CG]GGA
GGGGCTTCTTGCCACCAC[CG]CC[CG][CG]CTACCACCTG[CG
]CC
SEQ ID NO: 5024
CCTCTG[CG]TCCAGGG[CG]TGTACTGAGCCCAGGCTAGCTGAG
[CG]AGGCTGCAGCCCCTG[[CG]]ATGGCC[CG]GGAAGAGGCA
AGTGC[CG][CG]GGGCCAGAG[CG]AGGAGGGACCAGCAGGG[C
G]GCCTGGACCCCCACTTGGC[CG][CG]CAGGCAGGAGGGG[CG
][CG]CCCTCTG[CG]GAG[CG][CG]G[CG]C[CG][CG]GCAG
C[CG]CAGCATCTGG[CG]CT[CG]CTCTCTCTGGC[CG]GAGAG
GC[CG][CG]ACACCTAG[CG][CG]GGGC[CG]AGGCTAGGAAG
GG[CG]GGC[CG]GGGAGGGAGGAGGGCACTGGGAGGAAGC[CG]
[CG]GG[[CG]]AGGAAGCCC[CG]CTCCTGC[CG]AGTGCCTGG
AGAGGAGATTCCCAGCCTTCCTGCCCAACC[CG]AAACTTTTCCA
ACACA[CG]CAGG[CG]TATTCCT[CG]CAGGATT[CG]G[CG]G
TCC[CG]AGT[CG]CAGTCAGGGAGGAGGCT[CG]GGAAGCACA[
[CG]]TGCCCTGGCACACTGGAGGAGGTACACAGGCACACCAGGA
GGGACAGGGCCTCTTGGGAGG[CG]GCTGAGGG[CG]TGAAGGCA
GCAGG[CG]GCCACACATC[CG]AAAGGGACTCCCTG[CG]AG[C
G]GGAT[CG]AG[CG]CTTAAAACCCTGCCACAGCTT
SEQ ID NO: 5025
TCTTTTCTTCTCT[CG]CACTCCACCTCCCACTGCCC[CG]CACC
CCCTTTAGCC[CG]GTGTTCCC[CG]CTC[CG]CTATGATTGA[C
G]TCTGGAAAGAAAGAGCTTTGTGAGGGGATGATTGTTATTAACT
TGTTATCCC[CG]G[CG]GGGGGG[CG]GGGAAC[CG]A[CG]TG
CC[CG]GGTGAG[CG]C[CG]GAGACC[CG]GAGCC[CG]GGGAG
[CG][CG]GGA[CG]AGCTACCAG[CG]CT[CG]GGTGG[CG]GC
[CG]CCAG[CG]GCCAG[CG]AAGGAGGCTG[CG][CG]CCAGCC
[CG]CC[CG][CG]G[CG]CC[CG]GGCTCAGG[CG]C[CG]TGA
[CG]GCTGCA[[CG]][CG]CTGCCC[CG]CACTCTGAGGGCCTT
CATTAGCT[CG]CTCCC[CG][CG]C[CG]AGGCTGGGG[CG]GG
CAGCA[CG]CT[CG]GAACTTCTGATCTGTTTCTCCATACTTTCT
CCCCCTCCTACTC[CG]CAGTGTCAGGGGCTCATGTCAGAGGAGT
G[CG]GG[CG]GACTACAGCCCTGG[CG]GC[CG]GGAGGACT[C
G]CAAAGG[CG]C[CG]GGGAAGAGGGACTGGTGAGTG[CG]GAG
GGGCT[CG][CG]TGCTGGCAAGACTGGC[[CG]]TGGGGAGG[C
G]G[CG]CAGGA[CG]AAGGGC[CG]CTGTCCC[CG][[CG]]CT
CCTTCCAGGGCC
SEQ ID NO: 5026
[CG]C[CG]TGA[CG]GCTGCA[CG][CG]CTGCCC[CG]CACTC
TGAGGGCCTTCATTAGCT[CG]CTCCC[CG][CG]C[CG]AGGCT
GGGG[CG]GGCAGCA[CG]CT[CG]GAACTTCTGATCTGTTTCTC
CATACTTTCTCCCCCTCCTACTC[CG]CAGTGTCAGGGGCTCATG
TCAGAGGAGTG[CG]GG[CG]GACTACAGCCCTGG[CG]GC[CG]
GGAGGACT[CG]CAAAGG[CG]C[CG]GGGAAGAGGGACTGGTGA
GTG[CG]GAGGGGCT[CG][CG]TGCTGGCAAGACTGGC[[CG]]
TGGGGAGG[CG]G[CG]CAGGA[CG]AAGGGC[CG]CTGTCCC[C
G][[CG]]CTCCTTCCAGGGCCCAGCTGGCCCCTCCTGCAGCAGA
CAGAGGA[CG]GGG[CG]GAGAGGGTCTGGGTGGGGTGGGAAGCT
TAGCTGGCC[CG][CG]AGGAGGGCAGGGC[CG]CAAGACTTCTG
GGGTC[CG]AATAGGTCAGGGGT[CG]GCAGCCCCAG[CG]GGTG
[CG]TAGCCAGAGCTTGGACT[CG]GGGAAGAGGG[CG]AGAAT[
CG]TGACCTCAAGAAGCTGGGGGTGGGGTGGGGTGGCCAGGGGGA
AGGGAGGGGAGG[CG]GTGGGGG[CG]CCCTTGTGGGTAGGTGGG
ATG[CG]AAGGGGAGGAGGGG
SEQ ID NO: 5027
CAGGGCAGGCTGGTCTTGAGCCTGGAGAAGGCTTTGCTCAGCA[C
G][CG]CATC[CG]GGCA[CG]CTCA[CG]GG[CG]TTGGC[CG]
[CG]TTC[CG]CTG[CG]ACTGCTTGCACTCTG[CG]GCTGAGCC
CTTGGC[CG]GGAGGGGCTTCTTGCCACCAC[CG]CC[CG][CG]
CTACCACCTG[CG]C[CG]C[CG]CCCCCAGCCACA[CG]GGGC[
CG]CTTCCTCTTGCAGCCTTC[CG][CG]CTGC[CG]GCTGTGCC
CAGAG[CG]CAG[CG]CTCCTCCT[CG]C[CG]T[CG]GGGTCCT
CCTCCTCTGC[CG]A[CG]AGTTGTCACTGGG[CG]AGG[CG]TA
GCTG[CG]CTCTA[CG]C[CG][CG]GAGGGG[CG]GCCTCTTGG
AGG[CG]GGGAC[CG]GGTACTCC[CG]CTGCAGCCCC[CG]AAG
CTCCATCTCCTC[CG]GATCACTCAC[CG]AGCC[CG]TGGACAT
CC[CG]TTGTCCCCCTTGCCCACA[CG][CG]TCCTCTTTCCTCC
CCCCTGGCCAGTCT[CG]CTGTCTC[CG]CCTTC[CG]CTCCCTG
G[CG]GAGG[CG]GAGGCCAGAGAG[CG]CTCCAAGGAAGACTAA
AAACCCAGGC[CG]GGAAG[CG][CG]GGGTGAGAAAG[CG]AGG
TGGGTGG[CG]AGAG[CG]TGAG[CG]CCCCTCTGCTGACCC[CG
]G
SEQ ID NO: 5028
AGGCTG[CG][CG]CCAGCC[CG]CC[CG][CG]G[CG]CC[CG]
GGCTCAGG[CG]C[CG]TGA[CG]GCTGCA[CG][CG]CTGCCC[
CG]CACTCTGAGGGCCTTCATTAGCT[CG]CTCCC[CG][CG][C
G]AGGCTGGGG[CG]GGCAGCA[CG]CT[CG]GAACTTCTGATCT
GTTTCTCCATACTTTCTCCCCCTCCTACTC[CG]CAGTGTCAGGG
GCTCATGTCAGAGGAGTG[CG]GG[CG]GACTACAGCCCTGG[CG
]GC[CG]GGAGGACT[CG]CAAAGG[CG]C[CG]GGGAAGAGGGA
CTGGTGAGTG[CG]GAGGGGCT[CG][CG]TGCTGGCAAGACTGG
C[[CG]]TGGGGAGG[CG]G[CG]CAGGA[CG]AAGGGC[CG]CT
GTCCC[CG][[CG]]CTCCTTCCAGGGCCCAGCTGGCCCCTCCTG
CAGCAGACAGAGGA[CG]GGG[CG]GAGAGGGTCTGGGTGGGGTG
GGAAGCTTAGCTGGCC[CG][CG]AGGAGGGCAGGGC[CG]CAAG
ACTTCTGGGGTC[CG]AATAGGTCAGGGGT[CG]GCAGCCCCAG[
CG]GGTG[CG]TAGCCAGAGCTTGGACT[CG]GGGAAGAGGG[CG
]AGAAT[CG]TGACCTCAAGAAGCTGGGGGGGGGTGGGGTGGCCA
GGGGGAAGGGAGGGGAGG[CG]GTGGGGG
SEQ ID NO: 5029
TGCTCAGCA[CG][CG]CATC[CG]GGCA[CG]CTCA[CG]GG[C
G]TTGGC[CG][CG]TTC[CG]CTG[CG]ACTGCTTGCACTCTG[
CG]GCTGAGCCCTTGGC[CG]GGAGGGGCTTCTTGCCACCAC[CG
]CC[CG][CG]CTACCACCTG[CG]C[CG]C[CG]CCCCCAGCCA
CA[CG]GGGC[CG]CTTCCTCTTGCAGCCTTC[CG][CG]CTGC[
CG]GCTGTGCCCAGAG[CG]CAG[CG]CTCCTCCT[CG]C[CG]T
[CG]GGGTCCTCCTCCTCTGC[CG]A[CG]AGTTGTCACTGGG[C
G]AGG[CG]TAGCTG[CG]CTCTA[CG]C[CG][CG]GAGGGG[C
G]GCCTCTTGGAGG[[CG]]GGGAC[CG]GGTACTCC[CG]CTGC
AGCCCC[CG]AAGCTCCATCTCCTC[CG]GATCACTCAC[CG]AG
CC[CG]TGGACATCC[CG]TTGTCCCCCTTGCCCACA[CG][CG]
TCCTCTTTCCTCCCCCCTGGCCAGTCT[CG]CTGTCTC[CG]CCT
TC[CG]CTCCCTGG[CG]GAGG[CG]GAGGCCAGAGAG[CG]CTC
CAAGGAAGACTAAAAACCCAGGC[CG]GGAAG[CG][CG]GGGTG
AGAAAG[CG]AGGTGGGTGG[CG]AGAG[CG]TGAG[CG]CCCCT
CTGCTGACCC[CG]GGGAG[CG]TGGACTA[CG]AGTTGG[CG]C
CCAAGTCCAG
SEQ ID NO: 5030
AGCAG[CG]G[CG]GAGC[CG]GAGC[CG]CCAGAGCCAGAGC[C
G]GAGCTG[CG]G[CG]G[CG]TGGACC[CG]GCAGGGG[CG]GG
CCT[CG]GACAGCAGAGA[CG]CAG[CG]GGCC[CG]GC[CG]AC
[CG]GGCTG[CG]GGAGTGGCCC[CG]GGCATGGGG[CG]GC[CG
]G[CG]GGGGC[CG][CG]GG[CG]GG[CG]CTG[CG]CTT[CG]
GGCTGG[CG]G[CG]GGCTG[CG]TGAG[CG]GC[CG]GGA[CG]
CAGGATG[CG]CTC[CG]AGGGTG[CG]GCCCC[CG]GGC[CG]G
[CG]G[CG]C[CG]CTGTG[CG]GGG[CG]CTGAGCCTGCTGCTG
GG[CG][CG]CTGCTGGGCAAAGGTAAGGC[[CG]]GGG[CG]GG
TGCCTGG[CG][CG]C[CG]A[CG]CATG[CG]AACTTCC[CG]G
TTC[CG]GGGGAGCT[CG]GGGTGAGGGCAGC[CG]AAG[CG]AG
GGGTG[CG]G[CG]GGGGCCT[CG]G[CG]GGGGCT[CG]GATCC
CATCAACAG[CG]CCTCTG[CG]GGTGC[CG]AGC[CG]CCCCTA
ATCCAGAAGGG[CG]CTCCCAGCTGGG[CG]C[CG]GGATC[CG]
GGCAAGTTAGGCTGGTCC[CG]AGTCC[CG]AATCTCCCACCC[C
G]GACCCCCCAGACCCAGAGCTGCCC[CG][CG]GATGAGGAGGG
GG[CG]TGGCTGAGGGACA[CG]GTGTTTGTTCCCC
SEQ ID NO: 5031
T[CG][CG]GGCACTCACTCT[CG]CTCACACTACAATCAGATCC
TCCATG[CG]GCTTTCATATACTCTGTCACACT[CG]CAGCCAGA
ATCCCCT[CG]GATGGACTCTTGCAAACCTCCAGCCCCATCC[CG
]GGATC[CG]TG[CG]TCTTCTACAGCCACCACTTGGGCCAG[CG
]TCCAGGA[CG]CCCAAG[CG]TAACCTCCCCACTCTAAAC[CG]
TTAGGAATCAGTGGCTGGACTCAC[CG][[CG]]TCATAAAAGCA
TAAACTGTGACC[CG]ATGAGTC[CG][CG]CACT[CG]GAAAAC
AAGAGAA[CG]CTCCCA[CG]TCTC[CG]GG[[CG]]CAGCTTGT
GCCAG[CG]ACTACTAGGTCAGGGGG[CG]CAGCTGAGAGAATTC
AAGCAACCTCCC[CG]CAAC[CG]GTTC[CG]C[CG][[CG]]TT
TGTGGGCTGGTAGCC[CG]GAATACATTTCCCAGAGGCCTT[[CG
]][[CG]]GC[CG]A[CG]TGCTT[CG][CG]CAGGAA[CG]CAG
C[CG]CCTCC[CG]ACTGGAGGA[CG][CG]GTAG[CG]GAGCTG
CTCAAAG[CG]AGGTGCTCAGCCCTGGGAGGCTCAGGGCTGCC[[
CG]]AGGGGCTTAGTCCCAGAGCCAGTGCTGTCAGGGGCTGAGCA
TGTGAATAGGGCAGT[[CG]]GAAGACCATG
SEQ ID NO: 5032
[CG]CCCTGGAATTGC[CG][CG]G[CG]G[CG]GATGCAGAGGC
CAACCCAGAGTGCAACCATGGAGA[CG][CG]A[CG]TGTGTCCC
ATAGTAACCTGTTACAACATTATTTATAAGCTGCCATCCCTAGCC
TTCCCC[CG]CTTCCCCTC[CG]CTCCCT[CG]CCAGACTTG[CG
]GG[CG]A[CG]GGCACAGC[CG][CG]TCTGGCTCTTCC[CG]G
CCTCTCCCTTCTCT[CG][CG]GG[CG]CAGC[CG]ATCAATAGT
TAACACC[CG]GCTG[CG]GA[CG]G[CG]GCTCCATC[CG][CG
]GCAATCAC[CG]TAGTGCTTGTTTGTGGAAGC[CG]AG[[CG]]
TG[CG]TG[CG]C[CG][CG][CG][CG]CACCCAGTCCAG[CG]
[CG]GAGTGGG[CG]TCTACC[CG]AGGAGGGGTGTCTGGGGAGG
GGCTGCCCT[CG]TTACCCAAACAGTTTG[CG]CT[CG]CTTAAC
CTTGATGCAGCT[CG]AGGCTTCCCAGTCCAGCTCAGTTCAGACA
GAAAACCTGG[CG][CG][CG][CG][CG][CG]CACACACACA[
CG]CCTCCCCTGG[CG]T[CG]C[CG]CC[CG]GC[CG]GGTCCC
TGCCCTTAGGGACCAGAG[CG]G[CG]AC[CG]CTGCACCC[CG]
CAC[CG]CCTGCTGGAGGAGCCCC[CG]GAGC[CG]GGGC[CG]A
GC[CG]C[CG]G
SEQ ID NO: 5033
TCTG[CG]CCCTGGAATTGC[CG][CG]G[CG]G[CG]GATGCAG
AGGCCAACCCAGAGTGCAACCATGGAGA[CG][CG]A[CG]TGTG
TCCCATAGTAACCTGTTACAACATTATTTATAAGCTGCCATCCCT
AGCCTTCCCC[CG]CTTCCCCTC[CG]CTCCCT[CG]CCAGACTT
G[CG]GG[CG]A[CG]GGCACAGC[CG][CG]TCTGGCTCTTCC[
CG]GCCTCTCCCTTCTCT[CG][CG]GG[CG]CAGC[CG]ATCAA
TAGTTAACACC[CG]GCTG[CG]GA[CG]G[CG]GCTCCATC[CG
][CG]GCAATCAC[CG]TAGTGCTTGTTTGTGGAAGC[CG]AG[C
G]TG[CG]TG[CG]C[CG][CG][CG][CG]CACCCAGTCCAG[C
G][CG]GAGTGGG[CG]TCTACC[CG]AGGAGGGGTGTCTGGGGA
GGGGCTGCCCT[[CG]]TTACCCAAACAGTTTG[CG]CT[CG]CT
TAACCTTGATGCAGCT[CG]AGGCTTCCCAGTCCAGCTCAGTTCA
GACAGAAAACCTGG[CG][CG][CG][CG][CG][CG]CACACAC
ACA[CG]CCTCCCCTGG[CG]T[CG]C[CG]CC[CG]GC[CG]GG
TCCCTGCCCTTAGGGACCAGAG[CG]G[CG]AC[CG]CTGCACCC
[CG]CAC[CG]CCTGCTGGAGGAGCCCC[CG]GAGC[CG]GGGC[
CG]AGC[CG]CC
SEQ ID NO: 5034
TGCACCTGGGCTATGAGGCTGGAAGCAGAAAGGGGG[CG]CCAGA
AAG[CG]CA[CG]C[CG][CG]AGGGC[CG]G[CG]GGAAATGTA
GTCTCA[CG]C[CG]GTAAAGCCACAGAG[CG]A[CG]ATGAGG[
CG]AGA[CG]TCTG[CG]TTCTTCTCAGGCCTGAGACCCAAC[CG
]GCC[[CG]]GGCACCAGCTCCTGCTGGACCCCAGAG[CG]CCTG
GAAAGCTC[CG]GAACCTCTCACCTGC[CG]CCTCCT[CG]GGTC
CAAGTGCCAC[CG][CG]GC[CG][CG]CCCC[CG]GCAGCCCAG
GG[CG][CG]CTTCCACCA[CG]GTAC[CG]GTGGATT[CG]C[C
G]TG[[CG]]CAGC[CG]GAAGATGG[CG]CAGA[CG]CACAAAG
CACAC[CG]ATGCTG[CG]CCATGATAGGGC[CG]G[CG]C[[CG
]]CAGTGTCTTC[CG]GGAAACATAGTCTTTAGG[[CG]]TAAAG
GCAGCAGCC[CG]GCCTTGAAGC[CG]GATCT[CG][CG]ATGTT
TCAGGGTGAGC[CG]GA[CG]CAGG[CG]TGCCTG[CG]CAGTG[
CG][CG]GAGGAGTGCTGTT[[CG]]TGTGTT[CG]AGTCCCTGG
GTTGCTTCCTGGGGTCTGTGGTGCTGGGTGTGCTATCTG[[CG]]
TGTGATTCTCTAG[CG]AGAGATTGTGGG[CG]AGTGAC[CG]AG
TGGGCAAG
SEQ ID NO: 5035
G[CG]GGAAATGTAGTCTCA[CG]C[CG]GTAAAGCCACAGAG[C
G]A[CG]ATGAGG[CG]AGA[CG]TCTG[CG]TTCTTCTCAGGCC
TGAGACCCAAC[CG]GCC[CG]GGCACCAGCTCCTGCTGGACCCC
AGAG[CG]CCTGGAAAGCTC[CG]GAACCTCTCACCTGC[CG]CC
TCCT[CG]GGTCCAAGTGCCAC[CG][CG]GC[CG][CG]CCCC[
CG]GCAGCCCAGGG[CG][CG]CTTCCACCA[CG]GTAC[CG]GT
GGATT[CG]C[CG]TG[[CG]]CAGC[CG]GAAGATGG[CG]CAG
A[CG]CACAAAGCACAC[CG]ATGCTG[[CG]]CCATGATAGGGC
[CG]G[CG]C[CG]CAGTGTCTTC[CG]GGAAACATAGTCTTTAG
G[[CG]]TAAAGGCAGCAGCC[[CG]]GCCTTGAAGC[CG]GATC
T[CG][CG]ATGTTTCAGGGTGAGC[CG]GA[CG]CAGG[CG]TG
CCTG[CG]CAGTG[CG][CG]GAGGAGTGCTGTT[[CG]]TGTGT
T[CG]AGTCCCTGGGTTGCTTCCTGGGGTCTGTGGTGCTGGGTGT
GCTATCTG[CG]TGTGATTCTCTAG[CG]AGAGATTGTGGG[CG]
AGTGAC[CG]AGTGGGCAAGGGGC[CG]TCACTGTGTGTG[CG]T
GATTTTGACAGTGTGTGGTGGTAGCTTCTGACTC[CG][CG]TGG
GT
SEQ ID NO: 5036
GATC[CG]TG[CG]TCTTCTACAGCCACCACTTGGGCCAG[CG]T
CCAGGA[CG]CCCAAG[CG]TAACCTCCCCACTCTAAAC[CG]TT
AGGAATCAGTGGCTGGACTCAC[CG][[CG]]TCATAAAAGCATA
AACTGTGACC[CG]ATGAGTC[CG][CG]CACT[CG]GAAAACAA
GAGAA[CG]CTCCCA[CG]TCTC[CG]GG[[CG]]CAGCTTGTGC
CAG[CG]ACTACTAGGTCAGGGGG[CG]CAGCTGAGAGAATTCAA
GCAACCTCCC[CG]CAAC[CG]GTTC[CG]C[CG][CG]TTTGTG
GGCTGGTAGCC[CG]GAATACATTTCCCAGAGGCCTT[[CG]][[
CG]]GC[[CG]]A[CG]TGCTT[CG][CG]CAGGAA[CG]CAGC[
CG]CCTCC[CG]ACTGGAGGA[CG][CG]GTAG[CG]GAGCTGCT
CAAAG[CG]AGGTGCTCAGCCCTGGGAGGCTCAGGGCTGCC[[CG
]]AGGGGCTTAGTCCCAGAGCCAGTGCTGTCAGGGGCTGAGCATG
TGAATAGGGCAGT[[CG]]GAAGACCATGTGTGTCTGTGGCTTTT
AAATACACCC[CG]AA[[CG]]TCTATCTCTTTTAACTGGAGTAT
TTAATTTATTTACATTTAATATAGCCACTGATAGATTTAAAGCTG
CCATTTTATTATATTTTCTTTTT
SEQ ID NO: 5037
TC[CG]TG[CG]TCTTCTACAGCCACCACTTGGGCCAG[CG]TCC
AGGA[CG]CCCAAG[CG]TAACCTCCCCACTCTAAAC[CG]TTAG
GAATCAGTGGCTGGACTCAC[CG][CG]TCATAAAAGCATAAACT
GTGACC[CG]ATGAGTC[CG][CG]CACT[CG]GAAAACAAGAGA
A[CG]CTCCCA[CG]TCTC[CG]GG[[CG]]CAGCTTGTGCCAG[
CG]ACTACTAGGTCAGGGGG[CG]CAGCTGAGAGAATTCAAGCAA
CCTCCC[CG]CAAC[CG]GTTC[CG]C[CG][CG]TTTGTGGGCT
GGTAGCC[CG]GAATACATTTCCCAGAGGCCTT[[CG]][CG]GC
[[CG]]A[[CG]]TGCTT[CG][CG]CAGGAA[CG]CAGC[CG]C
CTCC[CG]ACTGGAGGA[CG][CG]GTAG[CG]GAGCTGCTCAAA
G[CG]AGGTGCTCAGCCCTGGGAGGCTCAGGGCTGCC[[CG]]AG
GGGCTTAGTCCCAGAGCCAGTGCTGTCAGGGGCTGAGCATGTGAA
TAGGGCAGT[CG]GAAGACCATGTGTGTCTGTGGCTTTTAAATAC
ACCC[CG]AA[CG]TCTATCTCTTTTAACTGGAGTATTTAATTTA
TTTACATTTAATATAGCCACTGATAGATTTAAAGCTGCCATTTTA
TTATATTTTCTTTTTTT
SEQ ID NO: 5038
GTCTTCTACAGCCACCACTTGGGCCAG[CG]TCCAGGA[CG]CCC
AAG[CG]TAACCTCCCCACTCTAAAC[CG]TTAGGAATCAGTGGC
TGGACTCAC[CG][CG]TCATAAAAGCATAAACTGTGACC[CG]A
TGAGTC[CG][CG]CACT[CG]GAAAACAAGAGAA[CG]CTCCCA
[CG]TCTC[CG]GG[[CG]]CAGCTTGTGCCAG[CG]ACTACTAG
GTCAGGGGG[CG]CAGCTGAGAGAATTCAAGCAACCTCCC[CG]C
AAC[CG]GTTC[CG]C[CG][[CG]]TTTGTGGGCTGGTAGCC[C
G]GAATACATTTCCCAGAGGCCTT[[CG]][[CG]]GC[[CG]]A
[[CG]]TGCTT[CG][CG]CAGGAA[CG]CAGC[CG]CCTCC[CG
]ACTGGAGGA[CG][CG]GTAG[CG]GAGCTGCTCAAAG[CG]AG
GTGCTCAGCCCTGGGAGGCTCAGGGCTGCC[[CG]]AGGGGCTTA
GTCCCAGAGCCAGTGCTGTCAGGGGCTGAGCATGTGAATAGGGCA
GT[[CG]]GAAGACCATGTGTGTCTGTGGCTTTTAAATACACCC[
CG]AA[[CG]]TCTATCTCTTTTAACTGGAGTATTTAATTTATTT
ACATTTAATATAGCCACTGATAGATTTAAAGCTGCCATTTTATTA
TATTTTCTTTTTTTTTTTTAG
SEQ ID NO: 5039
AG[CG]CA[CG]C[CG][CG]AGGGC[CG]G[CG]GGAAATGTAG
TCTCA[CG]C[CG]GTAAAGCCACAGAG[CG]A[CG]ATGAGG[C
G]AGA[CG]TCTG[CG]TTCTTCTCAGGCCTGAGACCCAAC[CG]
GCC[[CG]]GGCACCAGCTCCTGCTGGACCCCAGAG[CG]CCTGG
AAAGCTC[CG]GAACCTCTCACCTGC[CG]CCTCCT[CG]GGTCC
AAGTGCCAC[CG][CG]GC[CG][CG]CCCC[CG]GCAGCCCAGG
G[CG][CG]CTTCCACCA[CG]GTAC[CG]GTGGATT[CG]C[CG
]TG[[CG]]CAGC[CG]GAAGATGG[CG]CAGA[CG]CACAAAGC
ACAC[CG]ATGCTG[CG]CCATGATAGGGC[CG]G[CG]C[[CG]
]CAGTGTCTTC[[CG]]GGAAACATAGTCTTTAGG[[CG]]TAAA
GGCAGCAGCC[[CG]]GCCTTGAAGC[CG]GATCT[CG][CG]AT
GTTTCAGGGTGAGC[CG]GA[CG]CAGG[CG]TGCCTG[CG]CAG
TG[CG][CG]GAGGAGTGCTGTT[CG]TGTGTT[CG]AGTCCCTG
GGTTGCTTCCTGGGGTCTGTGGTGCTGGGTGTGCTATCTG[[CG]
]TGTGATTCTCTAG[CG]AGAGATTGTGGG[CG]AGTGAC[CG]A
GTGGGCAAGGGGC[CG]TCACTGTGTGTG[CG]TGATTTTGACAG
TGTGTGGTGGTA
SEQ ID NO: 5040
GTCTCA[CG]C[CG]GTAAAGCCACAGAG[CG]A[CG]ATGAGG[
CG]AGA[CG]TCTG[CG]TTCTTCTCAGGCCTGAGACCCAAC[CG
]GCC[[CG]]GGCACCAGCTCCTGCTGGACCCCAGAG[CG]CCTG
GAAAGCTC[CG]GAACCTCTCACCTGC[CG]CCTCCT[CG]GGTC
CAAGTGCCAC[CG][CG]GC[CG][CG]CCCC[CG]GCAGCCCAG
GG[CG][CG]CTTCCACCA[CG]GTAC[CG]GTGGATT[CG]C[C
G]TG[[CG]]CAGC[CG]GAAGATGG[CG]CAGA[CG]CACAAAG
CACAC[CG]ATGCTG[CG]CCATGATAGGGC[CG]G[CG]C[CG]
CAGTGTCTTC[CG]GGAAACATAGTCTTTAGG[[CG]]TAAAGGC
AGCAGCC[CG]GCCTTGAAGC[CG]GATCT[CG][CG]ATGTTTC
AGGGTGAGC[CG]GA[CG]CAGG[CG]TGCCTG[CG]CAGTG[CG
][CG]GAGGAGTGCTGTT[[CG]]TGTGTT[CG]AGTCCCTGGGT
TGCTTCCTGGGGTCTGTGGTGCTGGGTGTGCTATCTG[[CG]]TG
TGATTCTCTAG[CG]AGAGATTGTGGG[CG]AGTGAC[CG]AGTG
GGCAAGGGGC[CG]TCACTGTGTGTG[CG]TGATTTTGACAGTGT
GTGGTGGTAGCTTCTGACTC[CG][CG]TGGGT[CG]TTGAATGT
AT
SEQ ID NO: 5041
TG[CG]TCTTCTACAGCCACCACTTGGGCCAG[CG]TCCAGGA[C
G]CCCAAG[CG]TAACCTCCCCACTCTAAAC[CG]TTAGGAATCA
GTGGCTGGACTCAC[CG][CG]TCATAAAAGCATAAACTGTGACC
[CG]ATGAGTC[CG][CG]CACT[CG]GAAAACAAGAGAA[CG]C
TCCCA[CG]TCTC[CG]GG[CG]CAGCTTGTGCCAG[CG]ACTAC
TAGGTCAGGGGG[CG]CAGCTGAGAGAATTCAAGCAACCTCCC[C
G]CAAC[CG]GTTC[CG]C[CG][[CG]]TTTGTGGGCTGGTAGC
C[CG]GAATACATTTCCCAGAGGCCTT[CG][[CG]]GC[CG]A[
CG]TGCTT[CG][CG]CAGGAA[CG]CAGC[CG]CCTCC[CG]AC
TGGAGGA[CG][CG]GTAG[CG]GAGCTGCTCAAAG[CG]AGGTG
CTCAGCCCTGGGAGGCTCAGGGCTGCC[[CG]]AGGGGCTTAGTC
CCAGAGCCAGTGCTGTCAGGGGCTGAGCATGTGAATAGGGCAGT[
[CG]]GAAGACCATGTGTGTCTGTGGCTTTTAAATACACCC[CG]
AA[CG]TCTATCTCTTTTAACTGGAGTATTTAATTTATTTACATT
TAATATAGCCACTGATAGATTTAAAGCTGCCATTTTATTATATTT
TCTTTTTTTTTTT
SEQ ID NO: 5042
[CG]AGA[CG]TCTG[CG]TTCTTCTCAGGCCTGAGACCCAAC[C
G]GCC[CG]GGCACCAGCTCCTGCTGGACCCCAGAG[CG]CCTGG
AAAGCTC[CG]GAACCTCTCACCTGC[CG]CCTCCT[CG]GGTCC
AAGTGCCAC[CG][CG]GC[CG][CG]CCCC[CG]GCAGCCCAGG
G[CG][CG]CTTCCACCA[CG]GTAC[CG]GTGGATT[CG]C[CG
]TG[[CG]]CAGC[CG]GAAGATGG[CG]CAGA[CG]CACAAAGC
ACAC[CG]ATGCTG[[CG]]CCATGATAGGGC[CG]G[CG]C[CG
]CAGTGTCTTC[CG]GGAAACATAGTCTTTAGG[[CG]]TAAAGG
CAGCAGCC[CG]GCCTTGAAGC[CG]GATCT[[CG]][CG]ATGT
TTCAGGGTGAGC[CG]GA[CG]CAGG[CG]TGCCTG[CG]CAGTG
[CG][CG]GAGGAGTGCTGTT[[CG]]TGTGTT[CG]AGTCCCTG
GGTTGCTTCCTGGGGTCTGTGGTGCTGGGTGTGCTATCTG[CG]T
GTGATTCTCTAG[CG]AGAGATTGTGGG[CG]AGTGAC[CG]AGT
GGGCAAGGGGC[CG]TCACTGTGTGTG[CG]TGATTTTGACAGTG
TGTGGTGGTAGCTTCTGACTC[CG][CG]TGGGT[CG]TTGAATG
TATGACTGGGAC[CG]TTTAG[CG]GTGGATACACAACTGTGT
SEQ ID NO: 5043
CAGAG[CG]A[CG]ATGAGG[CG]AGA[CG]TCTG[CG]TTCTTC
TCAGGCCTGAGACCCAAC[CG]GCC[[CG]]GGCACCAGCTCCTG
CTGGACCCCAGAG[CG]CCTGGAAAGCTC[CG]GAACCTCTCACC
TGC[CG]CCTCCT[CG]GGTCCAAGTGCCAC[CG][CG]GC[CG]
[CG]CCCC[CG]GCAGCCCAGGG[CG][CG]CTTCCACCA[CG]G
TAC[CG]GTGGATT[CG]C[CG]TG[[CG]]CAGC[CG]GAAGAT
GG[CG]CAGA[CG]CACAAAGCACAC[CG]ATGCTG[CG]CCATG
ATAGGGC[CG]G[CG]C[[CG]]CAGTGTCTTC[CG]GGAAACAT
AGTCTTTAGG[CG]TAAAGGCAGCAGCC[[CG]]GCCTTGAAGC[
CG]GATCT[CG][CG]ATGTTTCAGGGTGAGC[CG]GA[CG]CAG
G[CG]TGCCTG[CG]CAGTG[CG][CG]GAGGAGTGCTGTT[[CG
]]TGTGTT[CG]AGTCCCTGGGTTGCTTCCTGGGGTCTGTGGTGC
TGGGTGTGCTATCTG[[CG]]TGTGATTCTCTAG[CG]AGAGATT
GTGGG[CG]AGTGAC[CG]AGTGGGCAAGGGGC[CG]TCACTGTG
TGTG[CG]TGATTTTGACAGTGTGTGGTGGTAGCTTCTGACTC[C
G][CG]TGGGT[CG]TTGAATGTATGACTGGGAC[CG]TTTAG[C
G]GT
SEQ ID NO: 5044
TCAGGCCTGAGACCCAAC[CG]GCC[CG]GGCACCAGCTCCTGCT
GGACCCCAGAG[CG]CCTGGAAAGCTC[CG]GAACCTCTCACCTG
C[CG]CCTCCT[CG]GGTCCAAGTGCCAC[CG][CG]GC[CG][C
G]CCCC[CG]GCAGCCCAGGG[CG][CG]CTTCCACCA[CG]GTA
C[CG]GTGGATT[CG]C[CG]TG[CG]CAGC[CG]GAAGATGG[C
G]CAGA[CG]CACAAAGCACAC[CG]ATGCTG[CG]CCATGATAG
GGC[CG]G[CG]C[CG]CAGTGTCTTC[[CG]]GGAAACATAGTC
TTTAGG[CG]TAAAGGCAGCAGCC[[CG]]GCCTTGAAGC[CG]G
ATCT[CG][CG]ATGTTTCAGGGTGAGC[CG]GA[CG]CAGG[CG
]TGCCTG[CG]CAGTG[CG][CG]GAGGAGTGCTGTT[[CG]]TG
TGTT[CG]AGTCCCTGGGTTGCTTCCTGGGGTCTGTGGTGCTGGG
TGTGCTATCTG[[CG]]TGTGATTCTCTAG[CG]AGAGATTGTGG
G[CG]AGTGAC[CG]AGTGGGCAAGGGGC[CG]TCACTGTGTGTG
[CG]TGATTTTGACAGTGTGTGGTGGTAGCTTCTGACTC[CG][C
G]TGGGT[CG]TTGAATGTATGACTGGGAC[CG]TTTAG[CG]GT
GGATACACAACTGTGTG[CG]GCTGTGGAAGATTGCC
SEQ ID NO: 5045
TCTGGGGTCTTGTAACTCTCTGAGAACCTCATGAAACAAGATTTC
CTCTCAGATTAAAAAAAAAAAAAGGCA[CG]CATAACAGTGAATG
CAAAACATC[CG]CAATTTCAGGGGGT[CG]GAGACCCCTG[[CG
]]CACCCACCTAAGGGGTCCATGCACCTGGGCTATGAGGCTGGAA
GCAGAAAGGGGG[CG]CCAGAAAG[CG]CA[CG]C[CG][CG]AG
GGC[CG]G[CG]GGAAATGTAGTCTCA[CG]C[CG]GTAAAGCCA
CAGAG[CG]A[CG]ATGAGG[CG]AGA[CG]TCTG[CG]TTCTTC
TCAGGCCTGAGACCCAAC[CG]GCC[[CG]]GGCACCAGCTCCTG
CTGGACCCCAGAG[CG]CCTGGAAAGCTC[CG]GAACCTCTCACC
TGC[CG]CCTCCT[CG]GGTCCAAGTGCCAC[CG][CG]GC[CG]
[CG]CCCC[CG]GCAGCCCAGGG[CG][CG]CTTCCACCA[CG]G
TAC[CG]GTGGATT[CG]C[CG]TG[[CG]]CAGC[CG]GAAGAT
GG[CG]CAGA[CG]CACAAAGCACAC[CG]ATGCTG[CG]CCATG
ATAGGGC[CG]G[CG]C[CG]CAGTGTCTTC[CG]GGAAACATAG
TCTTTAGG[CG]TAAAGGCAGCAGCC[[CG]]GCCTTGAAGC[CG
]GATCT[[CG]][CG]ATGTTTCAGGGTGAGC[CG]G
SEQ ID NO: 5046
GC[CG]CCAGAGCCAGAGC[CG]GAGCTG[CG]G[CG]G[CG]TG
GACC[CG]GCAGGGG[CG]GGCCT[CG]GACAGCAGAGA[CG]CA
G[CG]GGCC[CG]GC[CG]AC[CG]GGCTG[CG]GGAGTGGCCC[
CG]GGCATGGGG[CG]GC[CG]G[CG]GGGGC[CG][CG]GG[CG
]GG[CG]CTG[CG]CTT[CG]GGCTGG[CG]G[CG]GGCTG[CG]
TGAG[CG]GC[CG]GGA[CG]CAGGATG[CG]CTC[CG]AGGGTG
[CG]GCCCC[CG]GGC[CG]G[CG]G[CG]C[CG]CTGTG[CG]G
GG[CG]CTGAGCCTGCTGCTGGG[CG][CG]CTGCTGGGCAAAGG
TAAGGC[[CG]]GGG[CG]GGTGCCTGG[CG][CG]C[CG]A[CG
]CATG[CG]AACTTCC[CG]GTTC[CG]GGGGAGCT[CG]GGGTG
AGGGCAGC[CG]AAG[CG]AGGGGTG[CG]G[CG]GGGGCCT[CG
]G[CG]GGGGCT[CG]GATCCCATCAACAG[CG]CCTCTG[CG]G
GTGC[CG]AGC[CG]CCCCTAATCCAGAAGGG[CG]CTCCCAGCT
GGG[CG]C[CG]GGATC[CG]GGCAAGTTAGGCTGGTCC[CG]AG
TCC[CG]AATCTCCCACCC[CG]GACCCCCCAGACCCAGAGCTGC
CC[CG][CG]GATGAGGAGGGGG[CG]TGGCTGAGGGACA[CG]G
TGTTTGTTCCCCATCCCTGAGTTC[CG]TG[[CG]]
SEQ ID NO: 5047
ATCCCCT[CG]GATGGACTCTTGCAAACCTCCAGCCCCATCC[[C
G]]GGATC[CG]TG[CG]TCTTCTACAGCCACCACTTGGGCCAG[
CG]TCCAGGA[CG]CCCAAG[CG]TAACCTCCCCACTCTAAAC[C
G]TTAGGAATCAGTGGCTGGACTCAC[CG][CG]TCATAAAAGCA
TAAACTGTGACC[CG]ATGAGTC[CG][CG]CACT[CG]GAAAAC
AAGAGAA[CG]CTCCCA[CG]TCTC[CG]GG[CG]CAGCTTGTGC
CAG[CG]ACTACTAGGTCAGGGGG[CG]CAGCTGAGAGAATTCAA
GCAACCTCCC[CG]CAAC[CG]GTTC[CG]C[CG][[CG]]TTTG
TGGGCTGGTAGCC[CG]GAATACATTTCCCAGAGGCCTT[[CG]]
[[CG]]GC[CG]A[CG]TGCTT[CG][CG]CAGGAA[CG]CAGC[
CG]CCTCC[CG]ACTGGAGGA[CG][CG]GTAG[CG]GAGCTGCT
CAAAG[CG]AGGTGCTCAGCCCTGGGAGGCTCAGGGCTGCC[[CG
]]AGGGGCTTAGTCCCAGAGCCAGTGCTGTCAGGGGCTGAGCATG
TGAATAGGGCAGT[[CG]]GAAGACCATGTGTGTCTGTGGCTTTT
AAATACACCC[CG]AA[[CG]]TCTATCTCTTTTAACTGGAGTAT
TTAATTTATTTACATTTAATATAGC
SEQ ID NO: 5048
ATTTATAAGCTGCCATCCCTAGCCTTCCCC[CG]CTTCCCCTC[C
G]CTCCCT[CG]CCAGACTTG[CG]GG[CG]A[CG]GGCACAGC[
CG][CG]TCTGGCTCTTCC[CG]GCCTCTCCCTTCTCT[CG][CG
]GG[CG]CAGC[CG]ATCAATAGTTAACACC[CG]GCTG[CG]GA
[CG]G[CG]GCTCCATC[CG][CG]GCAATCAC[CG]TAGTGCTT
GTTTGTGGAAGC[CG]AG[CG]TG[CG]TG[CG]C[CG][CG][C
G][CG]CACCCAGTCCAG[CG][CG]GAGTGGG[CG]TCTACC[C
G]AGGAGGGGTGTCTGGGGAGGGGCTGCCCT[[CG]]TTACCCAA
ACAGTTTG[CG]CT[[CG]]CTTAACCTTGATGCAGCT[CG]AGG
CTTCCCAGTCCAGCTCAGTTCAGACAGAAAACCTGG[CG][CG][
CG][CG][CG][CG]CACACACACA[CG]CCTCCCCTGG[CG]T[
CG]C[CG]CC[CG]GC[CG]GGTCCCTGCCCTTAGGGACCAGAG[
CG]G[CG]AC[CG]CTGCACCC[CG]CAC[CG]CCTGCTGGAGGA
GCCCC[CG]GAGC[CG]GGGC[CG]AGC[CG]C[CG]G[CG]TCC
C[CG]AGTG[CG]CCCCCTGTG[CG]TGC[CG]C[CG][CG]CTG
TTGCT[CG]CAGTGTGCTGG[CG]C[CG]AGCT[CG]GTGGACA[
CG][[CG]][CG]CAGTCAGAGCTGCCTCT
SEQ ID NO: 5049
ATAAGCTGCCATCCCTAGCCTTCCCC[CG]CTTCCCCTC[CG]CT
CCCT[CG]CCAGACTTG[CG]GG[CG]A[CG]GGCACAGC[CG][
CG]TCTGGCTCTTCC[CG]GCCTCTCCCTTCTCT[CG][CG]GG[
CG]CAGC[CG]ATCAATAGTTAACACC[CG]GCTG[CG]GA[CG]
G[CG]GCTCCATC[CG][CG]GCAATCAC[CG]TAGTGCTTGTTT
GTGGAAGC[CG]AG[CG]TG[CG]TG[CG]C[CG][CG][CG][C
G]CACCCAGTCCAG[CG][CG]GAGTGGG[CG]TCTACC[CG]AG
GAGGGGTGTCTGGGGAGGGGCTGCCCT[[CG]]TTACCCAAACAG
TTTG[[CG]]CT[CG]CTTAACCTTGATGCAGCT[CG]AGGCTTC
CCAGTCCAGCTCAGTTCAGACAGAAAACCTGG[CG][CG][CG][
CG][CG][CG]CACACACACA[CG]CCTCCCCTGG[CG]T[CG]C
[CG]CC[CG]GC[CG]GGTCCCTGCCCTTAGGGACCAGAG[CG]G
[CG]AC[CG]CTGCACCC[CG]CAC[CG]CCTGCTGGAGGAGCCC
C[CG]GAGC[CG]GGGC[CG]AGC[CG]C[CG]G[CG]TCCC[CG
]AGTG[CG]CCCCCTGTG[CG]TGC[CG]C[CG][CG]CTGTTGC
T[CG]CAGTGTGCTGG[CG]C[CG]AGCT[CG]GTGGACA[CG][
[CG]][CG]CAGTCAGAGCTGCCTCT[CG]CC
SEQ ID NO: 5050
GTAACCTGTTACAACATTATTTATAAGCTGCCATCCCTAGCCTTC
CCC[CG]CTTCCCCTC[CG]CTCCCT[CG]CCAGACTTG[CG]GG
[CG]A[CG]GGCACAGC[CG][CG]TCTGGCTCTTCC[CG]GCCT
CTCCCTTCTCT[CG][CG]GG[CG]CAGC[CG]ATCAATAGTTAA
CACC[CG]GCTG[CG]GA[CG]G[CG]GCTCCATC[CG][CG]GC
AATCAC[CG]TAGTGCTTGTTTGTGGAAGC[CG]AG[[CG]]TG[
CG]TG[CG]C[CG][CG][CG][CG]CACCCAGTCCAG[CG][CG
]GAGTGGG[CG]TCTACC[CG]AGGAGGGGTGTCTGGGGAGGGGC
TGCCCT[[CG]]TTACCCAAACAGTTTG[[CG]]CT[[CG]]CTT
AACCTTGATGCAGCT[CG]AGGCTTCCCAGTCCAGCTCAGTTCAG
ACAGAAAACCTGG[CG][CG][CG][CG][CG][CG]CACACACA
CA[CG]CCTCCCCTGG[CG]T[CG]C[CG]CC[CG]GC[CG]GGT
CCCTGCCCTTAGGGACCAGAG[CG]G[CG]AC[CG]CTGCACCC[
CG]CAC[CG]CCTGCTGGAGGAGCCCC[CG]GAGC[CG]GGGC[C
G]AGC[CG]C[CG]G[CG]TCCC[CG]AGTG[CG]CCCCCTGTG[
CG]TGC[CG]C[CG][CG]CTGTTGCT[CG]CAGTGTGCTGG[CG
]C[CG]AGCT[CG]GTGGACA[CG][CG]C
SEQ ID NO: 5051
CCCAAGTTCTCTCTGTGTCCCCCT[CG][CG]GGCCC[CG]CACC
T[CG][CG]TCC[CG]GAT[CG]CTCTGATTC[CG][CG]ACTCC
TTGGC[CG]C[CG]CTG[CG]CATGGAAAGCTCTGCCAAGATGGA
GAG[CG]G[CG]G[CG]C[CG]GCCAGCAGCCCCAGC[CG]CAGC
CCCAGCAGCCCTTCCTGC[CG]CC[CG]CAGCCTGTTTCTTTGCC
A[CG]GC[CG]CAGC[CG][CG]G[CG]GC[CG]CAGC[CG]C[C
G]CAG[CG]GCAG[CG]CAGAG[CG][CG]CAGCAGCAGCAGCAG
CAGCAGCAGCAGCAGCAGCAGG[CG]C[CG]CAGCTGAGAC[CG]
G[CG]GC[CG]A[CG]GCCAGCCCTCAGGGGG[CG]GTCACAAGT
CAG[CG]CCCAAGCAAGTCAAG[CG]ACAG[CG]CT[CG]TCTT[
CG]CC[CG]AACTGATG[CG]CTGCAAA[CG]C[CG]GCTCAACT
TCAG[CG]GCTTTGGCTACAGCCTGC[CG]CAGCAGCAGC[CG]G
C[CG]C[CG]TGG[CG][CG]C[CG]CAA[CG]AG[CG][CG]AG
[CG]CAAC[CG][CG]TCAAGTTGGTCAACCTGGGCTTTGCCACC
CTT[CG]GGAGCA[CG]TCCCCAA[CG]G[CG][CG]GCCAACAA
GAAGATGAGTAAGGTGGAGACACTG[CG]CT[CG]G[CG]GT[CG
]AGTACATC[CG][CG][CG]CTGCA
SEQ ID NO: 5052
C[CG]CACCT[CG][CG]TCC[CG]GAT[CG]CTCTGATTC[CG]
[[CG]]ACTCCTTGGC[CG]C[CG]CTG[CG]CATGGAAAGCTCT
GCCAAGATGGAGAG[CG]G[CG]G[CG]C[CG]GCCAGCAGCCCC
AGC[CG]CAGCCCCAGCAGCCCTTCCTGC[CG]CC[CG]CAGCCT
GTTTCTTTGCCA[CG]GC[CG]CAGC[CG][CG]G[CG]GC[CG]
CAGC[CG]C[CG]CAG[CG]GCAG[CG]CAGAG[CG][CG]CAGC
AGCAGCAGCAGCAGCAGCAGCAGCAGCAGCAGG[CG]C[CG]CAG
CTGAGAC[CG]G[CG]GC[CG]A[CG]GCCAGCCCTCAGGGGG[C
G]GTCACAAGTCAG[CG]CCCAAGCAAGTCAAG[CG]ACAG[CG]
CT[CG]TCTT[CG]CC[CG]AACTGATG[CG]CTGCAAA[CG]C[
CG]GCTCAACTTCAG[CG]GCTTTGGCTACAGCCTGC[CG]CAGC
AGCAGC[CG]GC[CG]C[CG]TGG[CG][CG]C[CG]CAA[CG]A
G[CG][CG]AG[CG]CAAC[CG][CG]TCAAGTTGGTCAACCTGG
GCTTTGCCACCCTT[CG]GGAGCA[[CG]]TCCCCAA[CG]G[CG
][CG]GCCAACAAGAAGATGAGTAAGGTGGAGACACTG[CG]CT[
CG]G[CG]GT[CG]AGTACATC[CG][CG][CG]CTGCAGCAGCT
GCTGGA[CG]AGCATGA[CG][CG]GTGAG
SEQ ID NO: 5053
AGCTGGATGAAGCCCACCC[CG]TCCCCTTCTGGTACCAAAGTGC
TTACTCCTCTCCAAAGTGC[CG]TGTCTGAACTGC[CG]CTGGGA
AGAAG[CG]GCTCCTGAGA[CG][CG]CCCACACCTTTCACCTGC
[CG][CG][CG]CTTCCCCCTCCT[CG]GCCACCTTCC[CG]G[C
G]GAAGCAG[CG]AGGAGGGAGCCCCCTTTGGC[CG]TCCTC[CG
]TGGAAC[CG]GTTTTC[CG]AGGCTGGCAAAAGC[CG]AGGCTG
GATTTGGGGGAGGAATATTAGACT[CG]GAGGAGTCTG[CG][CG
]CTTTTCTCCTCCC[CG][CG]CCTCC[CG]GT[CG]C[[CG]][
CG]GGTTCAC[CG]CTCAGTCCC[CG][CG]CT[CG]CTC[CG]C
ACCCCACCCACTTCCTGTGCT[CG]CC[CG]GGGGG[CG]TGTGC
[CG]TG[CG]GCTGC[CG]GAGTT[CG]GGGAAGTTGTGGCTGT[
CG]AGAATGGGGGTCTGTGGGTACCTGTTCCTGCCCTGGAAGTGC
CT[CG]TGGT[CG]TGTCTCTCAGGCTGCTGTTCCTTGTACCCAC
AGGAGTGCC[CG]TG[CG]CAG[CG]GAGATGCCACCTTCCCCAA
AGCTATGGACAA[CG]TGA[CG]GTC[CG]GCAGGGGGAGAG[CG
]CCACCCTCAGGTAGGGAGCTGACA
SEQ ID NO: 5054
TGGATGAAGCCCACCC[CG]TCCCCTTCTGGTACCAAAGTGCTTA
CTCCTCTCCAAAGTGC[CG]TGTCTGAACTGC[CG]CTGGGAAGA
AG[CG]GCTCCTGAGA[CG][CG]CCCACACCTTTCACCTGC[CG
][CG][CG]CTTCCCCCTCCT[CG]GCCACCTTCC[CG]G[CG]G
AAGCAG[CG]AGGAGGGAGCCCCCTTTGGC[CG]TCCTC[CG]TG
GAAC[CG]GTTTTC[CG]AGGCTGGCAAAAGC[CG]AGGCTGGAT
TTGGGGGAGGAATATTAGACT[CG]GAGGAGTCTG[CG][CG]CT
TTTCTCCTCCC[CG][CG]CCTCC[CG]GT[[CG]]C[[CG]][C
G]GGTTCAC[CG]CTCAGTCCC[CG][CG]CT[CG]CTC[CG]CA
CCCCACCCACTTCCTGTGCT[CG]CC[CG]GGGGG[CG]TGTGC[
CG]TG[CG]GCTGC[CG]GAGTT[CG]GGGAAGTTGTGGCTGT[C
G]AGAATGGGGGTCTGTGGGTACCTGTTCCTGCCCTGGAAGTGCC
T[CG]TGGT[CG]TGTCTCTCAGGCTGCTGTTCCTTGTACCCACA
GGAGTGCC[CG]TG[CG]CAG[CG]GAGATGCCACCTTCCCCAAA
GCTATGGACAA[CG]TGA[CG]GTC[CG]GCAGGGGGAGAG[CG]
CCACCCTCAGGTAGGGAGCTGACATTG
SEQ ID NO: 5055
CAAAAGAAAGGGGGTGGGCAGAAAGGGAGATTTCCATCCCTTCAA
A[CG]TGCA[CG]CCCCTCC[CG][CG]GTCC[CG]GGAGGGAGT
CCCCCCTCCCAGGT[CG]AG[CG][CG]TCCAC[CG]GCTGTCCC
CACAGCAACAGG[CG]GG[CG]G[CG]GGGGAGGAGAGGC[CG][
CG]GGGGCAG[CG]CAGGCCTGG[CG]G[CG]GC[CG]AAATCCC
C[CG]GCCACCA[CG]A[CG]TTCCC[CG]GCTCTG[CG]G[CG]
[CG]C[CG]GGAGCAGGTGGTTGCCCTCTG[CG]TCCAGGG[CG]
TGTACTGAGCCCAGGCTAGCTGAG[CG]AGGCTGCAGCCCCTG[[
CG]]ATGGCC[CG]GGAAGAGGCAAGTGC[CG][CG]GGGCCAGA
G[CG]AGGAGGGACCAGCAGGG[CG]GCCTGGACCCCCACTTGGC
[CG][CG]CAGGCAGGAGGGG[CG][CG]CCCTCTG[CG]GAG[C
G][CG]G[CG]C[CG][CG]GCAGC[CG]CAGCATCTGG[CG]CT
[CG]CTCTCTCTGGC[CG]GAGAGGC[CG][CG]ACACCTAG[CG
][CG]GGGC[CG]AGGCTAGGAAGGG[CG]GGC[CG]GGGAGGGA
GGAGGGCACTGGGAGGAAGC[CG][CG]GG[[CG]]AGGAAGCCC
[CG]CTCCTGC[CG]AGTGCCTGGAGAGGAGATTCCCAGCCTTCC
TGCCCA
SEQ ID NO: 5056
AGCC[CG][CG]CTCACTCCTGCCCTCCT[CG]CAAAGAACTGGC
CAGCCCCACT[CG][CG]TCCAGCCCACAACTAGGCTGC[CG]GG
AC[CG]GGGAGCCAGACCCCAGGT[CG]CTCCAACTC[CG]G[CG
]AGGG[CG]GGGAGGGGAGTGACAGCAGCAACTAG[CG][CG][C
G]CTGGCAAAAGCACAGAGTCT[[CG]]GAATAGGCTAAA[CG]G
C[CG]G[CG][CG]GAGGGGTGGAGGCAAGAGGGGG[CG]GAGGA
GGAGTTGCC[CG]AG[CG]GAGAGGGATGA[CG]TCCTCCAGGGC
CTTGGGCTC[CG]AGGAAC[CG]AAGACTGGTG[CG]CT[CG]C[
CG]GGCCC[CG][CG]CACTAGCTCTGGGGTT[CG]CAGAGG[CG
]C[CG][CG]CC[CG]GCTTC[CG][CG]GCAGCTCCAACACAG[
CG][CG]CAGG[CG]GT[CG]ATCC[CG]GTCAGCTTAAAC[CG]
GG[CG]CAAGCCCTCTGTCCCCCTCAAAGCACCTCTCTGCT[CG]
TCCCTAGTCTCCAGGTGCC[CG]TCTGAGAGTCCCTGT[CG]CCT
C[CG]GG[CG]GACC[CG]GCCAGGCAGCCCC[CG]GT[CG]GGC
CAGCCT[CG]CCCCTTCCT[CG]CTTTCTCCCCCAT[CG]ACCT[
CG]AGCCAAGGGCAGG[CG]GCC[CG]CACC[CG][CG]CCCCTG
CC
SEQ ID NO: 5057
[CG]CCTCTGGGTAGCTGGATGAAGCCCACCC[CG]TCCCCTTCT
GGTACCAAAGTGCTTACTCCTCTCCAAAGTGC[CG]TGTCTGAAC
TGC[CG]CTGGGAAGAAG[CG]GCTCCTGAGA[CG][CG]CCCAC
ACCTTTCACCTGC[CG][CG][CG]CTTCCCCCTCCT[CG]GCCA
CCTTCC[CG]G[CG]GAAGCAG[CG]AGGAGGGAGCCCCCTTTGG
C[CG]TCCTC[CG]TGGAAC[CG]GTTTTC[CG]AGGCTGGCAAA
AGC[CG]AGGCTGGATTTGGGGGAGGAATATTAGACT[CG]GAGG
AGTCTG[CG][CG]CTTTTCTCCTCCC[CG][[CG]]CCTCC[CG
]GT[[CG]]C[[CG]][CG]GGTTCAC[CG]CTCAGTCCC[CG][
CG]CT[CG]CTC[CG]CACCCCACCCACTTCCTGTGCT[CG]CC[
CG]GGGGG[CG]TGTGC[CG]TG[CG]GCTGC[CG]GAGTT[CG]
GGGAAGTTGTGGCTGT[CG]AGAATGGGGGTCTGTGGGTACCTGT
TCCTGCCCTGGAAGTGCCT[CG]TGGT[CG]TGTCTCTCAGGCTG
CTGTTCCTTGTACCCACAGGAGTGCC[CG]TG[CG]CAG[CG]GA
GATGCCACCTTCCCCAAAGCTATGGACAA[CG]TGA[CG]GTC[C
G]GCAGGGGGAGAG[CG]CCACCCTCAGGTA
SEQ ID NO: 5058
AA[CG]GCCTGGGTC[CG]GCTTCCTCCTCCCCTGAAGCAG[CG]
AAGGGG[CG]TCACTGG[CG][CG]CTGTTAAA[CG]TCTT[CG]
CCAT[CG]GTTCCCTGCATCCTCCCTCCTGCCTGGGTAGCCAGCT
CCTGGG[CG][CG]CCCAGG[CG]CACA[CG]CTTCCCT[CG]CT
CCTCCTGCAGCCACAA[CG]CCCCCACCCCCCC[CG]CC[CG]CC
[CG]CCTTGTG[CG]GCAG[CG]GTGAC[CG]CCTTCTCCTGCTG
CCACCCCCTCCACCCCCTGTTCAAGGTCTGTCAC[CG]TAGGGGG
[CG]GGGGGG[CG][CG]TGGAGC[CG]CTGGGGGTT[[CG]]GC
CCACCC[CG][CG]AAC[CG]AGCTCC[CG]GCCCTGTG[CG]CC
CTCAGCTCTGC[CG][CG]GG[CG]TTGGCCTGGG[CG]GG[CG]
CAGGACTGCCTGGT[CG]CCCTGGAGCTCAGGGT[CG]GGGCCC[
CG][CG]TTTAACCACCAGG[CG]GAGG[CG]CAGG[CG]GAGCC
[CG]GAGAGGA[CG][CG]ACCCCTCTGGG[CG]GCCTTGGGCCC
CTGGA[CG]TGCCAGACTCTGGACCCCTG[CG]GGGGCTGC[CG]
TGGAGAGCAGAGGCAC[CG][CG]TCCTGCCCAGAGCTC[CG]AT
AGG[CG]GGC[CG][CG]TTGGGGGATTGTGGGGGC[CG]G
SEQ ID NO: 5059
GAGGCAAGTTATATAAAAG[CG]GC[[CG]]GCCCCCCTGCCCAG
[CG]GGGATGCTTTGTG[CG]GAG[CG]CACCTTAT[CG]GCCC[
CG][CG]CTG[CG]CC[CG]CC[CG][CG]CCTGCACC[CG]GGA
[CG]AGCC[CG]CTGC[CG]C[CG][CG][CG]CTGAG[CG]CAG
GGCCCCTCC[CG][CG]GCC[CG]CCAGC[CG]CCACC[CG]CC[
CG]GG[CG]G[CG]C[CG]CAGTGT[CG]CCCCCTGTCCCC[CG]
CACCTCCC[CG]GGGGAGGGGC[CG]GCC[CG][CG]CT[CG]CC
CCCAGCC[CG]AGGGGCAACTTAAAACATGG[CG]CCC[CG]GG[
CG]GGGGATTTGTGCAAATTGG[[CG]]GAGAAGGGA[CG][CG]
GGGAC[CG]AGT[CG]CCCCTT[CG]GCCAGGGATCCCAGGGAGG
CCCCCAGGC[CG]GAGGC[CG]GGGCTCAGGCTCTG[CG][CG]C
[CG]GCCCAGCCACTACTG[CG]C[CG][CG]G[CG]GG[CG]GA
G[CG]GG[CG]GGGGG[CG][CG]G[CG][CG]CAGGCT[CG]GC
C[CG]GTGGGGGTCC[CG]G[CG]AG[CG]GGAGGG[CG]GTTGG
GGACCC[CG]GC[CG][CG]C[CG]GG[CG][CG]GGGCT[CG]G
GATT[CG]GGAGAC[CG][CG][CG]G[CG]C[CG]AAGCCA[CG
][[CG]]TCAGCCCCACTGTCC[CG][CG][CG]CCT[CG]CCCC
AGGCCT[CG]GGCTCTT
SEQ ID NO: 5060
CTCCAGGCACTCTCAAGGATC[CG]GTTCATGTCTT[CG]CCCTG
GCC[CG]CTTGGTATAGGGGG[CG]CACAGGAAGAGGCCAAGAAG
TGGAAAGAACCTCATCT[CG]ATGTCCCAAGTGACAAAGCCCC[C
G]GGGCT[CG]GGGCTTTGGTACAGAGGAGCAGCAGAAGC[CG]C
[CG]C[CG]CAGA[CG]CC[CG]GATG[CG]GAGGACCCAGAG[C
G]CTG[CG]CAGCTGAGGAGCACCTGGGGAGCCAC[CG]C[CG]G
[CG]CCAACTTTTGCCATCC[CG]GGAGCCATAG[CG]GCAGAGA
GGGGGTCC[CG]GACC[CG]AGGTGGCAG[CG]AGGGGCTCTGCT
TTGGCAGCTGT[CG]GGGCTGGAGCTCAGGACCCCAACTCCAGCC
AAGT[CG]GGC[CG][CG]G[CG]GGGCAGG[CG]TAGGCTG[CG
]CAGGCAGGGGTGGC[CG][CG]GGTGCTGAGCCAGT[CG]C[CG
]C[CG][CG]CAGG[CG]GG[CG]CTGGAGTCTCAGCTACCTGG[
CG][CG]AC[CG]CCAGCAGCACCCAG[CG][CG]GGGC[CG]GG
AGCTGCTGGGGGCCCAGGCTC[CG]CTCTCCCCAC[CG]CTCTGC
AC[CG]CTGC[CG]GCTG[CG]GACAGACC[CG]ATG[CG]CCAC
CACCAC[CG]CAGTTGCCA[CG]ACCCCCAT
SEQ ID NO: 5061
GAAAGCTCTGCCAAGATGGAGAG[CG]G[CG]G[CG]C[CG]GCC
AGCAGCCCCAGC[CG]CAGCCCCAGCAGCCCTTCCTGC[CG]CC[
CG]CAGCCTGTTTCTTTGCCA[CG]GC[CG]CAGC[CG][CG]G[
CG]GC[CG]CAGC[CG]C[CG]CAG[CG]GCAG[CG]CAGAG[CG
][CG]CAGCAGCAGCAGCAGCAGCAGCAGCAGCAGCAGCAGG[CG
]C[CG]CAGCTGAGAC[CG]G[CG]GC[CG]A[[CG]]GCCAGCC
CTCAGGGGG[CG]GTCACAAGTCAG[CG]CCCAAGCAAGTCAAG[
CG]ACAG[CG]CT[CG]TCTT[CG]CC[CG]AACTGATG[CG]CT
GCAAA[CG]C[[CG]]GCTCAACTTCAG[CG]GCTTTGGCTACAG
CCTGC[CG]CAGCAGCAGC[CG]GC[CG]C[CG]TGG[CG][CG]
C[CG]CAA[CG]AG[CG][CG]AG[CG]CAAC[CG][CG]TCAAG
TTGGTCAACCTGGGCTTTGCCACCCTT[CG]GGAGCA[[CG]]TC
CCCAA[CG]G[CG][CG]GCCAACAAGAAGATGAGTAAGGTGGAG
ACACTG[CG]CT[CG]G[CG]GT[CG]AGTACATC[CG][CG][C
G]CTGCAGCAGCTGCTGGA[CG]AGCATGA[CG][CG]GTGAG[C
G]C[CG]CCTTCCAGGCAGG[CG]TCCTGT[CG]CCCACCATCTC
CCCCAACTACTCCAA[CG]ACTTG
SEQ ID NO: 5062
CTTCTTGCCT[CG]CCAC[CG][CG]TGCTCCTGGG[CG][CG]C
CC[CG]C[CG][CG]GGCCCTTGAGG[CG][CG][CG]GAGACAC
CAG[CG]CTGGCTTCC[CG]GGCC[CG][CG]GGC[CG]GGGAGG
GAAGCCT[CG]GGGCTG[CG]GGGTGAGAGGAAGAAAGCAAACC[
CG]GGGAGCAGG[CG]GCTGC[CG]CACC[CG][CG]CACCC[CG
]GGCCCTCACCA[CG]CCCTCCC[CG][CG][CG]C[CG]GCTCA
GGGGCTGCCC[CG]GAATCAGCTCCC[CG]GGGC[CG]C[CG]CA
A[CG]AAGGTGGATC[CG]CATCTTGATTGTTCTC[CG]GGAGCC
TCCTGGGGGCTC[[CG]]G[CG]G[CG]G[CG][CG]GG[CG][C
G]ACCCATCC[CG]CTGG[CG]CTCCC[CG]CT[CG]CTGAACCC
[CG]TTTGCCTGTCCACACCCCCT[CG]CTCCCCACCATTTTTCC
TGAC[CG]GCCTGTGTCCC[CG]AGCCCT[CG][CG]GCAGGCC[
CG]AGCAGG[CG]AT[CG][CG]GC[CG]GGCA[CG][CG][CG]
CCC[CG]GGCTCC[CG]CCCCCCTTC[CG]AGCATC[CG]C[CG]
CCTCTTTTCTGCTGGGTCTGGGAGGAGGGAGGCTGGGAGGC[CG]
CT[CG]GGGCCCAG[CG]TGCCAGCCC[CG]GAGTTCAGCCTCC[
CG]AGCTG[CG]G[CG]CC[[CG]]CAG[CG]GA
SEQ ID NO: 5063
AGCCACTACTG[CG]C[CG][CG]G[CG]GG[CG]GAG[CG]GG[
CG]GGGGG[CG][CG]G[CG][CG]CAGGCT[CG]GCC[CG]GTG
GGGGTCC[CG]G[CG]AG[CG]GGAGGG[CG]GTTGGGGACCC[C
G]GC[CG][CG]C[CG]GG[CG][CG]GGGCT[CG]GGATT[CG]
GGAGAC[CG][CG][CG]G[CG]C[CG]AAGCCA[CG][CG]TCA
GCCCCACTGTCC[CG][CG][CG]CCT[CG]CCCCAGGCCT[CG]
GGCTCTTCCTC[CG]CACCT[CG]TAAAGC[CG]AGACCCCCT[[
CG]]CAGTCCCCCACTC[CG]AGAGG[CG]GAAAAGTTACCTGGG
ATCAGCAGGGAGCC[CG]GG[CG][CG]C[CG][CG]G[[CG]]T
GGGGACTAGGCT[CG]GG[CG][CG][CG]TCCT[CG]G[CG]G[
CG]GTG[CG]CAGGAGACT[CG]GG[CG]TGGGGAGGAAGC[CG]
CAGCCCAGGGCTGCT[[CG]]C[CG]CTGTTCCCCC[CG]CCCCC
TGTTGCAGGAGACAC[CG]AGGCTC[CG][CG]GAGCTG[CG]G[
CG]GGGGCCCA[[CG]]CCCAGAGAC[CG]TG[CG]AGGAAAGCC
AACCT[CG]TCCTGCCTGCCCTCCCAGC[CG][[CG]]GGGGAGG
GGGCCAC[[CG]]CAGTACTTCAGGACAGTTACATGGGCACAGCC
TCCTC[CG]TCCTGG[CG]CAGGGTCAGGCTC[CG][CG]GA[CG
]A[CG]CCT
SEQ ID NO: 5064
[CG]GTTGGGGACCC[CG]GC[CG][CG]C[CG]GG[CG][CG]G
GGCT[CG]GGATT[CG]GGAGAC[CG][CG][CG]G[CG]C[CG]
AAGCCA[CG][[CG]]TCAGCCCCACTGTCC[CG][CG][CG]CC
T[CG]CCCCAGGCCT[CG]GGCTCTTCCTC[CG]CACCT[CG]TA
AAGC[CG]AGACCCCCT[[CG]]CAGTCCCCCACTC[CG]AGAGG
[CG]GAAAAGTTACCTGGGATCAGCAGGGAGCC[CG]GG[CG][C
G]C[CG][CG]G[CG]TGGGGACTAGGCT[CG]GG[CG][CG][C
G]TCCT[CG]G[CG]G[CG]GTG[CG]CAGGAGACT[CG]GG[CG
]TGGGGAGGAAGC[CG]CAGCCCAGGGCTGCT[[CG]]C[CG]CT
GTTCCCCC[CG]CCCCCTGTTGCAGGAGACAC[CG]AGGCTC[CG
][CG]GAGCTG[CG]G[[CG]]GGGGCCCA[[CG]]CCCAGAGAC
[CG]TG[CG]AGGAAAGCCAACCT[CG]TCCTGCCTGCCCTCCCA
GC[CG][[CG]]GGGGAGGGGGCCAC[[CG]]CAGTACTTCAGGA
CAGTTACATGGGCACAGCCTCCTC[[CG]]TCCTGG[CG]CAGGG
TCAGGCTC[[CG]][CG]GA[[CG]]A[CG]CCTGGAGACAGCTG
CCAATGCCAATAGCTTTAGCCCTTTATTCCCACTTAGATGATGGC
CTGGCCTCTCCAGACCCCTCTCCCCTCCCA
SEQ ID NO: 5065
[CG][CG]TCAGCCCCACTGTCC[CG][CG][CG]CCT[CG]CCC
CAGGCCT[CG]GGCTCTTCCTC[CG]CACCT[CG]TAAAGC[CG]
AGACCCCCT[[CG]]CAGTCCCCCACTC[CG]AGAGG[CG]GAAA
AGTTACCTGGGATCAGCAGGGAGCC[CG]GG[CG][CG]C[CG][
CG]G[[CG]]TGGGGACTAGGCT[CG]GG[CG][CG][CG]TCCT
[CG]G[CG]G[CG]GTG[CG]CAGGAGACT[CG]GG[CG]TGGGG
AGGAAGC[CG]CAGCCCAGGGCTGCT[[CG]]C[CG]CTGTTCCC
CC[CG]CCCCCTGTTGCAGGAGACAC[CG]AGGCTC[CG][CG]G
AGCTG[CG]G[CG]GGGGCCCA[[CG]]CCCAGAGAC[CG]TG[C
G]AGGAAAGCCAACCT[CG]TCCTGCCTGCCCTCCCAGC[CG][C
G]GGGGAGGGGGCCAC[CG]CAGTACTTCAGGACAGTTACATGGG
CACAGCCTCCTC[[CG]]TCCTGG[CG]CAGGGTCAGGCTC[CG]
[CG]GA[CG]A[CG]CCTGGAGACAGCTGCCAATGCCAATAGCTT
TAGCCCTTTATTCCCACTTAGATGATGGCCTGGCCTCTCCAGACC
CCTCTCCCCTCCCAGACATCCCCTGTGAGAAAGGAGGGAGAGGGT
GTTCCTGACCTTCAGGTGAGTTATTTATTGGCTAGGG
SEQ ID NO: 5066
GC[CG]AAGCCA[CG][CG]TCAGCCCCACTGTCC[CG][CG][C
G]CCT[CG]CCCCAGGCCT[CG]GGCTCTTCCTC[CG]CACCT[C
G]TAAAGC[CG]AGACCCCCT[CG]CAGTCCCCCACTC[CG]AGA
GG[CG]GAAAAGTTACCTGGGATCAGCAGGGAGCC[CG]GG[CG]
[CG]C[CG][CG]G[[CG]]TGGGGACTAGGCT[CG]GG[CG][C
G][CG]TCCT[CG]G[CG]G[CG]GTG[CG]CAGGAGACT[CG]G
G[CG]TGGGGAGGAAGC[CG]CAGCCCAGGGCTGCT[[CG]]C[C
G]CTGTTCCCCC[CG]CCCCCTGTTGCAGGAGACAC[CG]AGGCT
C[CG][CG]GAGCTG[CG]G[CG]GGGGCCCA[[CG]]CCCAGAG
AC[CG]TG[CG]AGGAAAGCCAACCT[CG]TCCTGCCTGCCCTCC
CAGC[CG][[CG]]GGGGAGGGGGCCAC[[CG]]CAGTACTTCAG
GACAGTTACATGGGCACAGCCTCCTC[[CG]]TCCTGG[CG]CAG
GGTCAGGCTC[[CG]][CG]GA[[CG]]A[CG]CCTGGAGACAGC
TGCCAATGCCAATAGCTTTAGCCCTTTATTCCCACTTAGATGATG
GCCTGGCCTCTCCAGACCCCTCTCCCCTCCCAGACATCCCCTGTG
AGAAAGGAGGGAGAGGGTGTTCCTGACCTTCAGGTGAGTTATTTA
SEQ ID NO: 5067
AG[CG]GCAG[CG]CAGAG[CG][CG]CAGCAGCAGCAGCAGCAG
CAGCAGCAGCAGCAGCAGG[CG]C[CG]CAGCTGAGAC[CG]G[C
G]GC[CG]A[CG]GCCAGCCCTCAGGGGG[CG]GTCACAAGTCAG
[CG]CCCAAGCAAGTCAAG[CG]ACAG[CG]CT[CG]TCTT[CG]
CC[CG]AACTGATG[CG]CTGCAAA[CG]C[CG]GCTCAACTTCA
G[CG]GCTTTGGCTACAGCCTGC[CG]CAGCAGCAGC[CG]GC[C
G]C[CG]TGG[CG][CG]C[CG]CAA[CG]AG[CG][CG]AG[CG
]CAAC[CG][CG]TCAAGTTGGTCAACCTGGGCTTTGCCACCCTT
[CG]GGAGCA[CG]TCCCCAA[CG]G[CG][CG]GCCAACAAGAA
GATGAGTAAGGTGGAGACACTG[CG]CT[CG]G[CG]GT[CG]AG
TACATC[CG][CG][CG]CTGCAGCAGCTGCTGGA[CG]AGCATG
A[CG][CG]GTGAG[CG]C[CG]CCTTCCAGGCAGG[CG]TCCTG
T[CG]CCCACCATCTCCCCCAACTACTCCAA[CG]ACTTGAACTC
CATGGC[CG]GCT[CG]C[CG]GTCTCATCCTACT[CG]T[CG]G
A[CG]AGGGCTCTTA[CG]ACC[CG]CTCAGCCC[CG]AGGAGCA
GGAGCTTCT[CG]ACTTCACCAACTGGTTCTGAGGGGCT[CG]GC
CTGGTCAGGC
SEQ ID NO: 5068
GCTCACCAGCCTATCTTGCCTAAGAATCACAAGGTCA[CG]ATAG
[CG]T[CG][CG]ATTCCACTCAC[CG]TACACTCCTTGGCCAGA
GATCCCCTCCAGGAGGACTGTCAGCAGCCACA[CG]AGAC[CG]T
ACAGTAAATCCATCTTCA[CG]TGAACATGAACATATCCAGCCCA
GGGGGTA[[CG]]CAA[CG]GGACCTTCAGGAGGC[CG]G[CG]G
CCAGCCAGG[CG][CG]CTCCACT[CG][CG]CC[CG]GGCCAAG
C[CG]AGGTGCC[CG]GGAAC[CG]CT[CG]C[CG]AAGGAGGAA
G[CG]C[CG]TC[CG]TCTGTCCTTCCC[CG]G[CG]G[CG]G[C
G]G[CG]AG[CG]GAG[CG]CAGGAGCCC[CG]CACTCCACACAC
TCATGCACACACACACTCACACACACTCACACACTCTCCCACAAC
ACAATACCCTGACACACACTCACA[CG]CA[CG]C[CG]CACTCA
CAC[CG]GGTGCCTGGGAAAAT[CG]CAGA[CG]C[CG]GGGAGG
AGCAGGGGG[CG]GTGATGGGAAGGGGAGCTG[CG]AGG[CG]AA
GTGTTCTTCAGGGAAG[CG]GGCT[CG]AGTCTC[[CG]]CAGCT
G[CG]G[CG]G[CG]G[CG]G[CG]G[CG][CG]CTGGGC[CG]G
[CG]G[CG]GG[CG][CG]GGCAGGGGGC[CG]GGGGTGC[CG][
CG][CG]G
SEQ ID NO: 5069
CTATCCTCCACCCC[CG]GGGGGTTCCTG[CG]CACTGAAAGAC[
CG]TTCTC[CG]GCAGGTTTTGGGATC[CG]G[CG]A[CG]GCTG
AC[CG][CG][CG][CG]CCCCCA[CG]CC[CG]GTTCCA[CG]A
TGCTGCAATACAGAAAGTTTA[CG]T[CG]GCCC[CG]ACC[CG]
[CG][CG]GGACTGCAGGGTC[CG]C[CG]GAG[CG][CG]G[CG
]CAGAGGCTTTTCCTG[CG][CG]TT[CG]GCCC[CG]GGAAAGG
GG[CG]GGAGGGCTGGCTC[CG]GGAG[CG]CA[CG]GG[CG][C
G]G[CG]GGGAGGGTACTCACTGTGAAGCA[CG]CTG[CG]CCCA
TGGATCATGTCTGTG[[CG]]TTACACCAGAGGCTC[CG]GGCTC
CACTAATTCCATTTAGAGA[CG]GGAAGACTTCCAGTGG[CG]GG
GGGAGGACAGGGT[CG]AGAGGTGTTAAAGA[CG]CAAAGCAAGA
AGGAAATAAAGGGGGGC[CG]AGAGGGAGAC[CG]AGAGGAAGGG
GGAGCTC[CG]AGCCCA[CG]CTGCAGCCAGATC[CG]GATGAGT
C[CG]TCCTC[CG]CCC[CG]GG[CG]GGCTCT[CG]CTCT[CG]
CTGGCCCTCAG[CG]C[CG][CG]CAGCCAGCAGCATCCCCAC[C
G]TGA[CG]CT[CG]CATCACACC[CG]GG[CG]C[CG]GC[CG]
CCACCATC[CG]C
SEQ ID NO: 5070
TGGGGGCTC[CG]G[CG]G[CG]G[CG][CG]GG[CG][CG]ACC
CATCC[CG]CTGG[CG]CTCCC[CG]CT[CG]CTGAACCC[CG]T
TTGCCTGTCCACACCCCCT[CG]CTCCCCACCATTTTTCCTGAC[
CG]GCCTGTGTCCC[CG]AGCCCT[CG][CG]GCAGGCC[CG]AG
CAGG[CG]AT[CG][CG]GC[CG]GGCA[CG][CG][CG]CCC[C
G]GGCTCC[CG]CCCCCCTTC[CG]AGCATC[CG]C[CG]CCTCT
TTTCTGCTGGGTCTGGGAGGAGGGAGGCTGGGAGGC[CG]CT[CG
]GGGCCCAG[CG]TGCCAGCCC[CG]GAGTTCAGCCTCC[CG]AG
CTG[CG]G[CG]CC[[CG]]CAG[CG]GAGGAGGTTTTCAGTGGC
TGATTGAAACTCACTGCAAAATCACCA[CG]ACTCTTTCACCTAC
TGAGATGATTGAC[CG]AGGTTTGGCCTTCCATTTTTACTGAGAT
TTGG[CG]AGAC[CG]AATGGAAG[CG]TC[CG]CACAGTAACTG
CAGCTGCTAGGCCAGAGGGGCCC[CG]G[CG]CCCTTCC[CG]CC
TCCCCTCC[CG]CTTGCTTTTGCCTTACT[CG]ATCTTACCACCA
CCCCTCCCC[CG]GCCCCC[CG]ACTGAGAACT[CG]GGCCTCTC
ACC[CG]CCCCCCAGCCTCC[CG]CTCTGGG[CG]AGCC
SEQ ID NO: 5071
[CG]CAGCC[CG]GTGGGGCAACCCTGACT[CG]GAC[CG]CT[C
G]GGAGAGCCCCAGGAGAGGCCAG[CG]C[CG][CG]CAGCAGC[
[CG]]CCC[CG]CTG[CG]CCCACCTCCC[CG]GCTGCTCC[CG]
GAGGGCTCACAAAGG[CG]GTGGC[CG]CC[CG]AGTGGCCTTCT
CCATCCAGG[[CG]]TT[CG][CG]TCCTCCTCCCCACCTTCTCT
CC[CG]AAGG[CG]AAAATGGCAGGGCCAGG[CG]AGAACCTGGG
ACAG[CG]GTGGCCCTAGCCCTG[[CG]]ATCCTCACCCCTCCTG
CTAGGAGAGGCTG[CG]GGCTGCC[CG][CG]GA[CG]ATGTGGC
[CG][CG]GCTGCTCC[CG]AG[CG]CATCTT[CG]GCC[CG]GG
TCCC[CG]C[CG]CCACCCCTCTTCTCTGCTCCTTCCATCC[CG]
CCCAGAGGAGTTGATGC[CG]CTGT[CG]C[CG]C[CG]C[CG]C
[CG]CTGCTGAAGC[CG][CG]GCTGATGGATGCCAGGGAGTGC[
CG]CATTGCTTAG[CG]ACCC[CG]CCTCTGGGTTTGCTGGTAGG
AG[CG]GCTGCTCTTTCTTCTTTCTTGCTTTGGGGTTTTATAGAA
AAGATAAGGACATTTTTATTTTATTCTTCACAA[CG]TCCTCCCC
TTCTCTT[CG]TTTTTGAAATGTGCATTCCCAG
SEQ ID NO: 5072
[CG]GTCTCCAGGG[CG]GAAAGGGGTGGAAGCTGACCCT[CG]C
CCTTCCCTCCAG[CG]CTGGCTTCAGGTGTGCCTTCTGCTACCTC
CTGTACTG[CG]AACAGGGGCC[CG]C[CG]AGCTC[CG]GGAGC
CCCTAGAAGAGGAAGACTCCTCTGGCCCCACTAGGTATCATC[CG
][CG]CTCTCC[CG]CTTTCCACCTG[CG]CCCT[CG]CTTGGGC
CAATCTCTGC[CG]CA[CG]TGTCCATCCCTGAACTGCA[CG]CT
ATCCTCCACCCC[CG]GGGGGTTCCTG[CG]CACTGAAAGAC[CG
]TTCTC[CG]GCAGGTTTTGGGATC[[CG]]G[CG]A[CG]GCTG
AC[CG][CG][CG]C[CG]CCCCCA[CG]CC[CG]GTTCCA[CG]
ATGCTGCAATACAGAAAGTTTA[CG]T[CG]GCCC[CG]ACC[CG
][CG][CG]GGACTGCAGGGTC[CG]C[CG]GAG[CG][CG]G[C
G]CAGAGGCTTTTCCTG[CG][CG]TT[CG]GCCC[CG]GGAAAG
GGG[CG]GGAGGGCTGGCTC[CG]GGAG[CG]CA[CG]GG[CG][
CG]G[CG]GGGAGGGTACTCACTGTGAAGCA[CG]CTG[CG]CCC
ATGGATCATGTCTGTG[[CG]]TTACACCAGAGGCTC[CG]GGCT
CCACTAATTCCATTTAGAGA[CG]GGAAGACTTCCAGTGG[CG]G
SEQ ID NO: 5073
AG[CG]GC[CG]TCCTTCCCCAGCT[CG]AAGCC[CG]TAGCACA
TT[CG]CAGGCAAAGCCTCCCAAGT[CG]TCTAGGCAGTTAGGGA
GCTCTG[CG]CATTTGCCAGCA[CG]GAGGTACCTCC[CG]GGGC
AGGGACACAACACAT[CG]CC[CG]AGAGTTTGTCCCAG[CG]AG
[CG]C[CG]ATTT[CG]TC[CG][CG]ATGCAAGTAACTGAGAT[
CG]GGAGCTGTCCC[CG]GCAGAG[CG]CACTCACCT[CG]GTCC
CAGGTGGACTGAAGTCCAGAG[CG]G[CG]CTGTGCAGCTGGAAG
GG[CG][CG][CG]ATAGCTCAAGTTAGAGG[CG]GCCC[CG]GG
G[CG][CG]G[CG]CAGGACACAAGACCTCAAACTGGTACTTGCA
CAGGTAGC[CG]TTGG[CG][CG]CAGGTGGCAT[CG]CATCTCC
TTCCAGCCTG[CG]GGCT[CG]ACCCCAC[CG]GTGGCCTGGAGT
AC[CG][CG]CATCTC[CG][CG][CG]GTGCAGGAG[CG]TTGG
GGCTCCTCCACCCACTGCAG[CG]TGT[CG]CTTT[CG]AGAC[C
G]C[CG]GGGT[CG]GAGGACAGCCAGGAGAAACCC[CG]CAAAG
GCT[CG]TTCTCCAGGGTGCAGTGGGAA[CG]CCTG[CG]CTCCA
GTG[[CG]]ACCCAGAACAGCAGGTCTTTGGAGCCCC
SEQ ID NO: 5074
GCTGTCCTTCCCCACTGGTCACACAAGAG[CG]GC[CG]TCCTTC
CCCAGCT[CG]AAGCC[CG]TAGCACATT[CG]CAGGCAAAGCCT
CCCAAGT[CG]TCTAGGCAGTTAGGGAGCTCTG[CG]CATTTGCC
AGCA[CG]GAGGTACCTCC[CG]GGGCAGGGACACAACACAT[CG
]CC[CG]AGAGTTTGTCCCAG[CG]AG[CG]C[CG]ATTT[CG]T
C[CG][CG]ATGCAAGTAACTGAGAT[CG]GGAGCTGTCCC[CG]
GCAGAG[CG]CACTCACCT[CG]GTCCCAGGTGGACTGAAGTCCA
GAG[CG]G[CG]CTGTGCAGCTGGAAGGG[[CG]][CG][CG]AT
AGCTCAAGTTAGAGG[CG]GCCC[[CG]]GGG[CG][CG]G[CG]
CAGGACACAAGACCTCAAACTGGTACTTGCACAGGTAGC[CG]TT
GG[CG][CG]CAGGTGGCAT[CG]CATCTCCTTCCAGCCTG[CG]
GGCT[CG]ACCCCAC[CG]GTGGCCTGGAGTAC[CG][CG]CATC
TC[CG][CG][CG]GTGCAGGAG[CG]TTGGGGCTCCTCCACCCA
CTGCAG[CG]TGT[CG]CTTT[CG]AGAC[CG]C[CG]GGGT[CG
]GAGGACAGCCAGGAGAAACCC[CG]CAAAGGCT[CG]TTCTCCA
GGGTGCAGTGGGAA[CG]CCTG[CG]CTCCAGTG[[CG]]A
SEQ ID NO: 5075
[CG]GCTGTCCTTCCCCACTGGTCACACAAGAG[CG]GC[CG]TC
CTTCCCCAGCT[CG]AAGCC[CG]TAGCACATT[CG]CAGGCAAA
GCCTCCCAAGT[CG]TCTAGGCAGTTAGGGAGCTCTG[CG]CATT
TGCCAGCA[CG]GAGGTACCTCC[CG]GGGCAGGGACACAACACA
T[CG]CC[CG]AGAGTTTGTCCCAG[CG]AG[CG]C[CG]ATTT[
CG]TC[CG][CG]ATGCAAGTAACTGAGAT[CG]GGAGCTGTCCC
[CG]GCAGAG[CG]CACTCACCT[CG]GTCCCAGGTGGACTGAAG
TCCAGAG[CG]G[CG]CTGTGCAGCTGGAAGGG[[CG]][[CG]]
[CG]ATAGCTCAAGTTAGAGG[CG]GCCC[[CG]]GGG[CG][CG
]G[CG]CAGGACACAAGACCTCAAACTGGTACTTGCACAGGTAGC
[CG]TTGG[CG][CG]CAGGTGGCAT[CG]CATCTCCTTCCAGCC
TG[CG]GGCT[CG]ACCCCAC[CG]GTGGCCTGGAGTAC[CG][C
G]CATCTC[CG][CG][CG]GTGCAGGAG[CG]TTGGGGCTCCTC
CACCCACTGCAG[CG]TGT[CG]CTTT[CG]AGAC[CG]C[CG]G
GGT[CG]GAGGACAGCCAGGAGAAACCC[CG]CAAAGGCT[CG]T
TCTCCAGGGTGCAGTGGGAA[CG]CCTG[CG]CTCCAGTG[[CG]
]
SEQ ID NO: 5076
G[[CG]][[CG]][CG]ATAGCTCAAGTTAGAGG[CG]GCCC[CG
]GGG[CG][CG]G[CG]CAGGACACAAGACCTCAAACTGGTACTT
GCACAGGTAGC[CG]TTGG[CG][CG]CAGGTGGCAT[CG]CATC
TCCTTCCAGCCTG[CG]GGCT[CG]ACCCCAC[CG]GTGGCCTGG
AGTAC[CG][CG]CATCTC[CG][CG][CG]GTGCAGGAG[CG]T
TGGGGCTCCTCCACCCACTGCAG[CG]TGT[CG]CTTT[CG]AGA
C[CG]C[CG]GGGT[CG]GAGGACAGCCAGGAGAAACCC[CG]CA
AAGGCT[CG]TTCTCCAGGGTGCAGTGGGAA[CG]CCTG[CG]CT
CCAGTG[CG]ACCCAGAACAGCAGGTCTTTGGAGCCCCCTC[CG]
GGCCCTGGGCCTGCC[CG]CAGGAG[CG][CG]AGCACAG[CG][
CG]CAGCT[CG]G[CG]CC[CG]CA[CG]CA[CG]GTGCTGAG[C
G]CCCCACCT[CG]CAGGATGCAGGCCTCCT[CG]GC[CG]CCTG
C[CG]CTTCATGGTAG[CG]TGGTGCAGGCTGTAGCAGGCCCC[C
G]AGGC[CG]AGCAGCCAGCA[CG]GT[CG]GCAGTGGGGTGTT[
CG]C[CG]C[CG]CC[CG]GCC[CG]GGCCAGAG[CG]CCTGCCA
GAGGAGGCACAGGG[CG]AA[CG]C[CG]GCCTCATTCTCTGAGG
CCC[CG]CAC
SEQ ID NO: 5077
CCCCCCTCTCCTTTGCACCCCATTCCTGC[CG]CTCCCACCTCCC
CTTCCCAGTCC[CG]CCAGGTGACTGTGTCTCATGCAG[CG]AAG
GCAACAAG[CG]TCCCCAGC[CG]AGGAAGGGAAGGGGCAGC[CG
]TCTTGGCT[CG][CG]AGGGAAGGAGGG[CG]GAAG[CG]GG[C
G]CC[CG]CT[[CG]]CAAGCTTATTGCATCCTAC[CG]CCTGTA
GAGCTGGCCTCCTCCAGCTGAGC[CG]AAATGCTTTCCACCCTCC
TCACATTCATGTCTAGGGA[CG]CAGGGTGCAGAAG[CG]AGACT
[CG]AGAGTCCAC[CG]GCCAGGGG[[CG]]TCTGTCCA[CG]GG
TCTGCA[CG]GGAG[CG]CAC[CG]C[CG]CT[CG]GCC[CG]GG
GG[CG]TC[CG]TGG[CG]CTGGGAG[CG]AGAGCTT[CG]G[CG
]G[CG]GCTG[CG]GGCAGGG[CG][CG][CG]GAG[CG]GGCTG
CAGGTG[CG]GG[CG]GAGGC[CG]G[CG]GGGGG[CG]C[CG]G
GGG[CG]CTG[CG][CG]GCCCTTGG[CG]G[CG]GGGG[CG][C
G][CG]GGGTGG[CG]GGGGAGGC[CG]AGG[CG]C[CG]GCAGC
TT[CG][CG]C[CG]G[CG]GCTGGAAG[CG]GG[CG]GGCTGCA
[CG]GG[CG]GCT[CG]AGTG[[CG]]GGGACCCCAGCCCCT[CG
]CCCT[CG]TGAG[CG]C[CG]CCCCTG
SEQ ID NO: 5078
AAGGAGAGAAGTGGT[CG]GTGTCTGTTTCCTTCTGTCCCC[CG]
GGGC[CG]TGGAGCTGT[CG]GAGGGAAGGAGGA[CG]GTG[CG]
GGGC[CG]CAGGGGG[CG][CG]GGG[CG][CG]G[CG]GGACCC
AGGCTA[CG]AG[CG]GGAGGGAGG[CG]GGAGT[CG]GGGGAAG
A[CG][CG]GCAGGC[CG]GC[CG]AGGGCACCC[CG]AGGAACA
TGGCATGGCCTCTGTG[CG]ATC[CG]AGT[CG][CG]GTCTC[C
G]GGGTGCCTGGGAGGGC[CG]AACCACTGGTGAGGG[CG]TGGG
GAGCAGGGGGTGGCAGAGGGCACC[CG]GG[CG]GTAGTC[CG]G
GA[CG][CG]CAAGGCAGAGCCCTGA[CG]CTC[CG]GGTCCC[C
G]TGCCTGGCTCTTCTTGCCT[CG]CCAC[CG][CG]TGCTCCTG
GG[CG][CG]CCC[CG]C[CG][CG]GGCCCTTGAGG[CG][CG]
[CG]GAGACACCAG[CG]CTGGCTTCC[CG]GGCC[CG][CG]GG
C[CG]GGGAGGGAAGCCT[CG]GGGCTG[CG]GGGTGAGAGGAAG
AAAGCAAACC[CG]GGGAGCAGG[CG]GCTGC[CG]CACC[CG][
CG]CACCC[CG]GGCCCTCACCA[CG]CCCTCCC[CG][CG][CG
]C[CG]GCTCAGGGGCTGCCC[CG]GAATCAGCTCCC[CG]GGGC
[CG]C[CG]CAA[CG]AAGG
SEQ ID NO: 5079
CTT[CG]GCCAGGGATCCCAGGGAGGCCCCCAGGC[CG]GAGGC[
CG]GGGCTCAGGCTCTG[CG][CG]C[CG]GCCCAGCCACTACTG
[CG]C[CG][CG]G[CG]GG[CG]GAG[CG]GG[CG]GGGGG[CG
][CG]G[CG][CG]CAGGCT[CG]GCC[CG]GTGGGGGTCC[CG]
G[CG]AG[CG]GGAGGG[CG]GTTGGGGACCC[CG]GC[CG][CG
]C[CG]GG[CG][CG]GGGCT[CG]GGATT[CG]GGAGAC[CG][
CG][CG]G[CG]C[CG]AAGCCA[CG][[CG]]TCAGCCCCACTG
TCC[CG][CG][CG]CCT[CG]CCCCAGGCCT[CG]GGCTCTTCC
TC[CG]CACCT[CG]TAAAGC[CG]AGACCCCCT[CG]CAGTCCC
CCACTC[CG]AGAGG[CG]GAAAAGTTACCTGGGATCAGCAGGGA
GCC[CG]GG[CG][CG]C[CG][CG]G[CG]TGGGGACTAGGCT[
CG]GG[CG][CG][CG]TCCT[CG]G[CG]G[CG]GTG[CG]CAG
GAGACT[CG]GG[CG]TGGGGAGGAAGC[CG]CAGCCCAGGGCTG
CT[CG]C[CG]CTGTTCCCCC[CG]CCCCCTGTTGCAGGAGACAC
[CG]AGGCTC[CG][CG]GAGCTG[CG]G[[CG]]GGGGCCCA[C
G]CCCAGAGAC[CG]TG[CG]AGGAAAGCCAACCT[CG]TCCTGC
CTGCCCTCCCAGC[CG][[CG]]GGGGAGGGGGCCAC[[CG]]CA
GTACT
SEQ ID NO: 5080
AGACCCCCT[CG]CAGTCCCCCACTC[CG]AGAGG[CG]GAAAAG
TTACCTGGGATCAGCAGGGAGCC[CG]GG[CG][CG]C[CG][CG
]G[CG]TGGGGACTAGGCT[CG]GG[CG][CG][CG]TCCT[CG]
G[CG]G[CG]GTG[CG]CAGGAGACT[CG]GG[CG]TGGGGAGGA
AGC[CG]CAGCCCAGGGCTGCT[CG]C[CG]CTGTTCCCCC[CG]
CCCCCTGTTGCAGGAGACAC[CG]AGGCTC[CG][CG]GAGCTG[
CG]G[CG]GGGGCCCA[CG]CCCAGAGAC[CG]TG[CG]AGGAAA
GCCAACCT[CG]TCCTGCCTGCCCTCCCAGC[CG][[CG]]GGGG
AGGGGGCCAC[CG]CAGTACTTCAGGACAGTTACATGGGCACAGC
CTCCTC[[CG]]TCCTGG[CG]CAGGGTCAGGCTC[[CG]][CG]
GA[[CG]]A[CG]CCTGGAGACAGCTGCCAATGCCAATAGCTTTA
GCCCTTTATTCCCACTTAGATGATGGCCTGGCCTCTCCAGACCCC
TCTCCCCTCCCAGACATCCCCTGTGAGAAAGGAGGGAGAGGGTGT
TCCTGACCTTCAGGTGAGTTATTTATTGGCTAGGGACTGCAGTAT
TTTTTTTTTCTTTTTGGAAAGAAAATAAAATCAAGTTGGTGGTGT
CTTCAAGTCATGTTA
SEQ ID NO: 5081
C[CG][CG]GGCTTGAACCCTTTCCATCTTTCATCTGTTTACACA
CAGCCCCAATACCTTTTCTCTAATTGCTCTCCCTTTTTAATTTAG
TTTTATTTTTAAACAGACCATTAGACCATGGCTTGTTTCTGGGCT
GAGCCTCC[CG]CTGGTGCAGCCCTGCAGATGGTC[[CG]]CTTC
AGCTACTC[CG]TTAGGAGG[CG]GGCAGTTTTGTCTGTGTCTTA
CTCCTTC[CG]TCCAGGGCATTC[CG]CAGACTCCTGCTCCCTTC
TTCCTCTCCACTTGCTCTCAATAGAGGG[CG][CG]CTGGG[CG]
AAGTAGGGG[[CG]]TGGCAGGAGCCC[CG]CTC[CG][CG]GAT
CCAGGTTGAAATTCCTCCCTCCTGGAATC[CG]AC[CG]TGAGCA
TTTCTGAG[CG]GTGGTGAGGAGGAGGCCACCAAGACACCTCCCT
CC[CG]CTGTGCAAAGGAA[CG]CAGGAGCC[CG]G[CG]CAGGT
GGTGGGCTTAC[CG][CG][CG]CA[CG]CCTGGCTGGAGAGGTG
A[CG]C[CG]CTGTCTGCCAACCTTTCCCAGCTTTTCCCA[CG]A
TTGGAGCCAAGAGAGGTCCC[[CG]]GGGATCTCAGTTGGGCAAT
TGTAAGGGAAGGAGCTCAGGACACTGACTTCAAGAT
SEQ ID NO: 5082
CTGGGTTCCCC[CG]AGGAAAAATACCCACC[CG][CG]AGGGCT
[CG]G[CG]GCTTTT[CG]ACT[CG]G[CG]GGGATGAACTGTGG
CAACTT[[CG]]GCAGCCCCCAC[CG][CG]GTG[CG]GAAGTAA
AGAGGGCAACATTGG[CG]ACTG[CG]GCT[CG]GAGGGGCTGGA
G[CG][CG]TGAAGC[CG]TGGGGG[[CG]]C[CG]TG[CG]CCT
CC[CG]CTCTCT[CG]TTT[CG]GC[CG]CAGGTCCTGGGACTC[
CG]ACTT[CG]GTGCTC[CG]GGTGATAG[CG]GCTG[CG]G[CG
]CCTGCAGTCCAGATCCT[CG]CAGTTCTG[CG]GG[CG]AAGGA
GG[[CG]]AA[CG]GAAT[CG]GCCCCCAGTGGGGAG[CG]CAAC
AAGCCACAGTAGCCAAACCC[CG][CG]CTCCTGCC[CG]GGCTC
CCAGA[CG]AA[CG]CAGC[CG]CAG[CG]GGGGGC[CG]GGCCC
[CG]AGCCCCA[CG]C[CG]C[CG]C[CG]C[CG][CG]CCAG[C
G]GTGGGGGG[CG]GGCTGGGGG[CG]GGG[CG]GC[CG]GGGCT
GCCTTCC[CG]GG[CG]CATATG[CG]AG[CG]CAGCACC[CG]G
[CG]CTGC[CG]AGCCACCTCCCC[CG]C[CG]CC[CG]CTAGCA
AGTTTGG[[CG]]GCTCCAAGCCAGG[CG][CG]CCTCAGGATCC
AGGCTCATTTGCTTCCACCTAGCTT[CG]GTG
SEQ ID NO: 5083
TCAGCAGCCTGCTGAGGAGTGGGGA[[CG]]AAGAGCAGCCTAAA
CTTAGGGCT[CG]GGATATTT[CG]ATGCCACCCAAATTGC[CG]
TCCTACCCCAA[CG]AGGCAGGGAAAGGAG[CG]GAG[CG][CG]
[CG][CG][CG]AGCTGAGTGAGTGCTTA[CG]T[CG]CAG[CG]
AGATCTGTGCTGGGATAATTAGAGAGGAGTTGGGCTGAGC[CG]A
GTCCTCTTTCAGCAGCAGCAGC[CG]GAGC[CG]C[CG]C[CG]C
AGCC[CG]GTGGGGCAACCCTGACT[CG]GAC[CG]CT[CG]GGA
GAGCCCCAGGAGAGGCCAG[CG]C[CG][CG]CAGCAGC[[CG]]
CCC[CG]CTG[CG]CCCACCTCCC[CG]GCTGCTCC[CG]GAGGG
CTCACAAAGG[CG]GTGGC[CG]CC[CG]AGTGGCCTTCTCCATC
CAGG[CG]TT[CG][CG]TCCTCCTCCCCACCTTCTCTCC[CG]A
AGG[CG]AAAATGGCAGGGCCAGG[CG]AGAACCTGGGACAG[[C
G]]GTGGCCCTAGCCCTG[[CG]]ATCCTCACCCCTCCTGCTAGG
AGAGGCTG[CG]GGCTGCC[CG][CG]GA[CG]ATGTGGC[CG][
CG]GCTGCTCC[CG]AG[CG]CATCTT[CG]GCC[CG]GGTCCC[
CG]C[CG]CCACCCCTCTTCTCTGCTCCTTCCATCC[CG]CCC
SEQ ID NO: 5084
C[CG]CCT[CG]GTCTGGGTTCCCC[CG]AGGAAAAATACCCACC
[CG][CG]AGGGCT[CG]G[CG]GCTTTT[CG]ACT[CG]G[CG]
GGGATGAACTGTGGCAACTT[[CG]]GCAGCCCCCAC[CG][CG]
GTG[CG]GAAGTAAAGAGGGCAACATTGG[CG]ACTG[CG]GCT[
CG]GAGGGGCTGGAG[CG][CG]TGAAGC[CG]TGGGGG[[CG]]
C[CG]TG[CG]CCTCC[CG]CTCTCT[CG]TTT[CG]GC[CG]CA
GGTCCTGGGACTC[CG]ACTT[CG]GTGCTC[CG]GGTGATAG[C
G]GCTG[CG]G[CG]CCTGCAGTCCAGATCCT[CG]CAGTTCTG[
CG]GG[CG]AAGGAGG[[CG]]AA[CG]GAAT[[CG]]GCCCCCA
GTGGGGAG[CG]CAACAAGCCACAGTAGCCAAACCC[CG][CG]C
TCCTGCC[CG]GGCTCCCAGA[CG]AA[CG]CAGC[CG]CAG[CG
]GGGGGC[CG]GGCCC[CG]AGCCCCA[CG]C[CG]C[CG]C[CG
]C[CG][CG]CCAG[CG]GTGGGGGG[CG]GGCTGGGGG[CG]GG
G[CG]GC[CG]GGGCTGCCTTCC[CG]GG[CG]CATATG[CG]AG
[CG]CAGCACC[CG]G[CG]CTGC[CG]AGCCACCTCCCC[CG]C
[CG]CC[CG]CTAGCAAGTTTGG[[CG]]GCTCCAAGCCAGG[CG
][CG]CCTCAGGATCCAGGCTCATTTGCTTCCACCT
SEQ ID NO: 5085
AAAATACCCACC[CG][CG]AGGGCT[CG]G[CG]GCTTTT[CG]
ACT[CG]G[CG]GGGATGAACTGTGGCAACTT[CG]GCAGCCCCC
AC[CG][CG]GTG[CG]GAAGTAAAGAGGGCAACATTGG[CG]AC
TG[CG]GCT[CG]GAGGGGCTGGAG[CG][CG]TGAAGC[CG]TG
GGGG[[CG]]C[CG]TG[CG]CCTCC[CG]CTCTCT[CG]TTT[C
G]GC[CG]CAGGTCCTGGGACTC[CG]ACTT[CG]GTGCTC[CG]
GGTGATAG[CG]GCTG[CG]G[CG]CCTGCAGTCCAGATCCT[CG
]CAGTTCTG[CG]GG[CG]AAGGAGG[[CG]]AA[[CG]]GAAT[
[CG]]GCCCCCAGTGGGGAG[[CG]]CAACAAGCCACAGTAGCCA
AACCC[CG][CG]CTCCTGCC[CG]GGCTCCCAGA[CG]AA[CG]
CAGC[CG]CAG[CG]GGGGGC[CG]GGCCC[CG]AGCCCCA[CG]
C[CG]C[CG]C[CG]C[CG][CG]CCAG[CG]GTGGGGGG[CG]G
GCTGGGGG[CG]GGG[CG]GC[CG]GGGCTGCCTTCC[CG]GG[C
G]CATATG[CG]AG[CG]CAGCACC[CG]G[CG]CTGC[CG]AGC
CACCTCCCC[CG]C[[CG]]CC[CG]CTAGCAAGTTTGG[CG]GC
TCCAAGCCAGG[CG][CG]CCTCAGGATCCAGGCTCATTTGCTTC
CACCTAGCTT[CG]GTGCCCCCTGCTAGG[CG]GGG
SEQ ID NO: 5086
CT[CG]GTCTGGGTTCCCC[CG]AGGAAAAATACCCACC[CG][C
G]AGGGCT[CG]G[CG]GCTTTT[CG]ACT[CG]G[CG]GGGATG
AACTGTGGCAACTT[CG]GCAGCCCCCAC[CG][CG]GTG[CG]G
AAGTAAAGAGGGCAACATTGG[CG]ACTG[CG]GCT[CG]GAGGG
GCTGGAG[CG][CG]TGAAGC[CG]TGGGGG[CG]C[CG]TG[CG
]CCTCC[CG]CTCTCT[CG]TTT[CG]GC[CG]CAGGTCCTGGGA
CTC[CG]ACTT[CG]GTGCTC[CG]GGTGATAG[CG]GCTG[CG]
G[CG]CCTGCAGTCCAGATCCT[CG]CAGTTCTG[CG]GG[CG]A
AGGAGG[[CG]]AA[[CG]]GAAT[[CG]]GCCCCCAGTGGGGAG
[[CG]]CAACAAGCCACAGTAGCCAAACCC[CG][CG]CTCCTGC
C[CG]GGCTCCCAGA[CG]AA[CG]CAGC[CG]CAG[CG]GGGGG
C[CG]GGCCC[CG]AGCCCCA[CG]C[CG]C[CG]C[CG]C[CG]
[CG]CCAG[CG]GTGGGGGG[CG]GGCTGGGGG[CG]GGG[CG]G
C[CG]GGGCTGCCTTCC[CG]GG[CG]CATATG[CG]AG[CG]CA
GCACC[CG]G[CG]CTGC[CG]AGCCACCTCCCC[CG]C[CG]CC
[CG]CTAGCAAGTTTGG[[CG]]GCTCCAAGCCAGG[CG][CG]C
CTCAGGATCCAGGCTCATTTGCTTCCACCTAGCT
SEQ ID NO: 5087
ACCT[CG][CG]CACCAGCAGC[CG]GCCAG[CG]G[CG]GCAGC
AGCCCATGCCTC[CG]GTGCAACAGCTG[CG]CCTCCTC[CG]GT
GCCC[CG]G[CG]G[CG]GGGG[CG]GGAGATAACCTGTCCCTGC
TGCTC[CG]CACCTCCT[CG]CC[CG]G[CG]G[CG]CCTTC[CG
]GACC[CG]CACCTCCT[CG]C[CG]CTGT[CG]GGCT[CG]TCC
TGCTGCTGCTGCTGCTGCT[CG]T[CG][CG]C[CG]GGGCAGCC
AGCTCAATGTGAG[CG]AGCTGA[CG]C[CG]TCCAGCCATGCCA
GTG[CG]CTC[CG]GCAGCAGTA[CG][CG]CAGCAGTC[CG][C
G]CAGCAGT[CG]G[CG]TC[CG]CCTCCCAGTACCACCAGTGCC
ACAGCCTGCAGCC[CG]C[CG]CCAGCCCCA[CG]GGCAGCCT[C
G]GCAGTCTGGGCTC[CG]GGCCCC[CG]CTCT[CG]CACCACCA
CCACCACC[CG]CACC[CG]G[CG]CACCACCAGCACCACCAGCC
CCAGG[CG][CG]C[CG][CG]AGAGCAACCCCTTCAC[CG]AAA
TAGCCATGAGCAGCTGCAGGTACAA[CG]GGGG[CG]TCATG[[C
G]]GC[CG]CTCAGCAACTTGAG[CG][CG]TCC[CG]C[CG]GA
ACCTGCA[CG]AGATGGACTCAGAGG[CG]CAGCCCCTGCAGCCC
CC[CG][CG]TCTG
SEQ ID NO: 5088
ACT[[CG]][[CG]][CG]TCTC[CG]G[CG]TGACTGC[CG]AG
ATTGA[[CG]]TGGAGGACA[CG]TCAAATTGATTCC[CG]CA[C
G]CTGCAGCCTCC[CG]GTCAGA[CG]AATTTCTCCCAAT[CG]G
ATGAAGTTCACCCTGGGCCTGGGGT[[CG]][CG]GG[CG]TGGA
GAGTGTCCTGGGAGGGGGCAGCAG[CG]G[CG]G[CG]GCAGGCC
CTGGAG[CG]GG[CG]GCAG[CG][CG]CTC[CG]CTGC[CG][C
G]CACAG[CG][CG]TCTCCAGCC[CG][CG]GCTGGGC[CG]C[
CG][CG]GCTCT[CG]GCTCT[CG]GG[CG]CCCTCCCTCTATGC
CTCTCA[CG][CG]G[CG]G[CG]G[CG]G[CG]CCCAAGCTCTC
C[CG]GACTG[CG]C[CG]GGCCCAGCCC[CG]GCCACCC[CG]G
CCACCC[CG]G[CG]CCAGGCAGCTGGC[CG]GCC[CG]CT[CG]
CTATGGGTAAGGGG[CG]GG[CG]ACAGGCAGGGCT[CG]GGAGG
GCTGATGAGGTGGGT[CG]GGTC[[CG]]CCTGCCTCCCTTCCCT
CT[CG]TC[[CG]]CTTTCCCTGGG[[CG]]ACCCAGTCCTGGGT
CCTGGAGAAGCTGCATTCTCCTCTGATCCCCAGCCTTCAGGGGGC
AGTTGAGCAAGTCTGGGAAGGGAGTGTTCCAAGTAGA[CG][CG]
CTAAAAGT[CG][CG]AAAGGG
SEQ ID NO: 5089
TC[[CG]]CTTCAGCTACTC[CG]TTAGGAGG[CG]GGCAGTTTT
GTCTGTGTCTTACTCCTTC[CG]TCCAGGGCATTC[CG]CAGACT
CCTGCTCCCTTCTTCCTCTCCACTTGCTCTCAATAGAGGG[CG][
CG]CTGGG[CG]AAGTAGGGG[[CG]]TGGCAGGAGCCC[CG]CT
C[CG][CG]GATCCAGGTTGAAATTCCTCCCTCCTGGAATC[CG]
AC[CG]TGAGCATTTCTGAG[CG]GTGGTGAGGAGGAGGCCACCA
AGACACCTCCCTCC[CG]CTGTGCAAAGGAA[CG]CAGGAGCC[C
G]G[CG]CAGGTGGTGGGCTTAC[CG][CG][CG]CA[CG]CCTG
GCTGGAGAGGTGA[CG]C[CG]CTGTCTGCCAACCTTTCCCAGCT
TTTCCCA[CG]ATTGGAGCCAAGAGAGGTCCC[CG]GGGATCTCA
GTTGGGCAATTGTAAGGGAAGGAGCTCAGGACACTGACTTCAAGA
TGAAGGGGGAGGTCAG[CG]AAGACAGTTCTAGGGTGGG[CG]G[
CG]GC[CG]CTGACAGAGCAGGAGCCACAGCCAC[CG]GGGCTTG
GAGATAGGAGCAAGT[CG]CAGG[CG]GAGGGGGCTG[CG]GGCT
GGCTGCCTGGGCAGCACAGGACTTGAGGGAGCTG[[CG]]GGGAC
TCC
SEQ ID NO: 5090
TCTGTGCTGGGATAATTAGAGAGGAGTTGGGCTGAGC[CG]AGTC
CTCTTTCAGCAGCAGCAGC[CG]GAGC[CG]C[CG]C[CG]CAGC
C[CG]GTGGGGCAACCCTGACT[CG]GAC[CG]CT[CG]GGAGAG
CCCCAGGAGAGGCCAG[CG]C[CG][CG]CAGCAGC[CG]CCC[C
G]CTG[CG]CCCACCTCCC[CG]GCTGCTCC[CG]GAGGGCTCAC
AAAGG[CG]GTGGC[CG]CC[CG]AGTGGCCTTCTCCATCCAGG[
CG]TT[CG][CG]TCCTCCTCCCCACCTTCTCTCC[CG]AAGG[C
G]AAAATGGCAGGGCCAGG[CG]AGAACCTGGGACAG[[CG]]GT
GGCCCTAGCCCTG[[CG]]ATCCTCACCCCTCCTGCTAGGAGAGG
CTG[CG]GGCTGCC[CG][CG]GA[CG]ATGTGGC[CG][[CG]]
GCTGCTCC[CG]AG[CG]CATCTT[CG]GCC[CG]GGTCCC[CG]
C[CG]CCACCCCTCTTCTCTGCTCCTTCCATCC[CG]CCCAGAGG
AGTTGATGC[CG]CTGT[CG]C[CG]C[CG]C[CG]C[CG]CTGC
TGAAGC[CG][CG]GCTGATGGATGCCAGGGAGTGC[CG]CATTG
CTTAG[CG]ACCC[CG]CCTCTGGGTTTGCTGGTAGGAG[CG]GC
TGCTCTTTCTTCTTTCTTGCTTTGGGGTTTTATAGAA
SEQ ID NO: 5091
AGAGAGGAGTTGGGCTGAGC[CG]AGTCCTCTTTCAGCAGCAGCA
GC[CG]GAGC[[CG]]C[CG]C[CG]CAGCC[CG]GTGGGGCAAC
CCTGACT[CG]GAC[CG]CT[CG]GGAGAGCCCCAGGAGAGGCCA
G[CG]C[CG][CG]CAGCAGC[[CG]]CCC[CG]CTG[CG]CCCA
CCTCCC[CG]GCTGCTCC[CG]GAGGGCTCACAAAGG[CG]GTGG
C[CG]CC[CG]AGTGGCCTTCTCCATCCAGG[[CG]]TT[CG][C
G]TCCTCCTCCCCACCTTCTCTCC[CG]AAGG[CG]AAAATGGCA
GGGCCAGG[CG]AGAACCTGGGACAG[CG]GTGGCCCTAGCCCTG
[CG]ATCCTCACCCCTCCTGCTAGGAGAGGCTG[CG]GGCTGCC[
CG][CG]GA[CG]ATGTGGC[CG][CG]GCTGCTCC[CG]AG[CG
]CATCTT[CG]GCC[CG]GGTCCC[CG]C[CG]CCACCCCTCTTC
TCTGCTCCTTCCATCC[CG]CCCAGAGGAGTTGATGC[CG]CTGT
[CG]C[CG]C[CG]C[CG]C[CG]CTGCTGAAGC[CG][CG]GCT
GATGGATGCCAGGGAGTGC[CG]CATTGCTTAG[CG]ACCC[[CG
]]CCTCTGGGTTTGCTGGTAGGAG[CG]GCTGCTCTTTCTTCTTT
CTTGCTTTGGGGTTTTATAGAAAAGATAAGGACATTTTT
SEQ ID NO: 5092
CTACCCCAA[CG]AGGCAGGGAAAGGAG[CG]GAG[CG][CG][C
G][CG][CG]AGCTGAGTGAGTGCTTA[CG]T[CG]CAG[CG]AG
ATCTGTGCTGGGATAATTAGAGAGGAGTTGGGCTGAGC[CG]AGT
CCTCTTTCAGCAGCAGCAGC[CG]GAGC[CG]C[CG]C[CG]CAG
CC[CG]GTGGGGCAACCCTGACT[CG]GAC[CG]CT[CG]GGAGA
GCCCCAGGAGAGGCCAG[CG]C[CG][CG]CAGCAGC[[CG]]CC
C[CG]CTG[CG]CCCACCTCCC[CG]GCTGCTCC[CG]GAGGGCT
CACAAAGG[CG]GTGGC[CG]CC[CG]AGTGGCCTTCTCCATCCA
GG[[CG]]TT[CG][CG]TCCTCCTCCCCACCTTCTCTCC[CG]A
AGG[CG]AAAATGGCAGGGCCAGG[CG]AGAACCTGGGACAG[CG
]GTGGCCCTAGCCCTG[[CG]]ATCCTCACCCCTCCTGCTAGGAG
AGGCTG[CG]GGCTGCC[CG][CG]GA[CG]ATGTGGC[CG][[C
G]]GCTGCTCC[CG]AG[CG]CATCTT[CG]GCC[CG]GGTCCC[
CG]C[CG]CCACCCCTCTTCTCTGCTCCTTCCATCC[CG]CCCAG
AGGAGTTGATGC[CG]CTGT[CG]C[CG]C[CG]C[CG]C[CG]C
TGCTGAAGC[CG][CG]GCTGATGGATGCCAGGGAGTGC[CG]CA
TTGCTTAG
SEQ ID NO: 5093
AGGGTGCAGAAG[CG]AGACT[CG]AGAGTCCAC[CG]GCCAGGG
G[CG]TCTGTCCA[CG]GGTCTGCA[CG]GGAG[CG]CAC[CG]C
[CG]CT[CG]GCC[CG]GGGG[CG]TC[CG]TGG[CG]CTGGGAG
[CG]AGAGCTT[CG]G[CG]G[CG]GCTG[CG]GGCAGGG[CG][
CG][CG]GAG[CG]GGCTGCAGGTG[CG]GG[CG]GAGGC[CG]G
[CG]GGGGG[CG]C[CG]GGGG[CG]CTG[CG][CG]GCCCTTGG
[CG]G[CG]GGGG[CG][CG][CG]GGGTGG[CG]GGGGAGGC[C
G]AGG[CG]C[CG]GCAGCTT[CG][CG]C[CG]G[CG]GCTGGA
AG[CG]GG[CG]GGCTGCA[CG]GG[CG]GCT[CG]AGTG[[CG]
]GGGACCCCAGCCCCT[[CG]]CCCT[CG]TGAG[CG]C[CG]CC
CCTGCCACCTGCTGCCAAGTCAC[CG]GACTGGGGATG[CG]GGG
GG[CG]GGGTG[CG]GGGAGAGGAAAG[CG]C[CG][CG]GGTGG
CA[CG]GTGCCTCTGG[CG]ACAGAGTAGATGGACC[CG]AAAGA
GACC[CG]AGGTGACTT[CG]GGCTGGGCAGGACACCCC[CG]GG
AGTTGCCAG[CG]GCTCTCAG[CG]GG[CG]CCTCTAGGACCCCT
TGTCACTG[CG]AGCAG[CG]CCTGCTCTGGGGAGGGGCT[CG]A
AGG[CG]C[CG][CG]CCTTCTCAA[CG][CG]C[CG]CTG[[CG
]]T
SEQ ID NO: 5094
CT[CG]AGAGTCCAC[CG]GCCAGGGG[CG]TCTGTCCA[CG]GG
TCTGCA[CG]GGAG[CG]CAC[CG]C[CG]CT[CG]GCC[CG]GG
GG[CG]TC[CG]TGG[CG]CTGGGAG[CG]AGAGCTT[CG]G[CG
]G[CG]GCTG[CG]GGCAGGG[CG][CG][CG]GAG[CG]GGCTG
CAGGTG[CG]GG[CG]GAGGC[CG]G[CG]GGGGG[CG]C[CG]G
GGG[CG]CTG[CG][CG]GCCCTTGG[CG]G[CG]GGGG[CG][C
G][CG]GGGTGG[CG]GGGGAGGC[CG]AGG[CG]C[CG]GCAGC
TT[CG][CG]C[CG]G[CG]GCTGGAAG[CG]GG[CG]GGCTGCA
[CG]GG[CG]GCT[CG]AGTG[CG]GGGACCCCAGCCCCT[CG]C
CCT[CG]TGAG[CG]C[CG]CCCCTGCCACCTGCTGCCAAGTCAC
[CG]GACTGGGGATG[CG]GGGGG[CG]GGGTG[CG]GGGAGAGG
AAAG[CG]C[CG][CG]GGTGGCA[CG]GTGCCTCTGG[CG]ACA
GAGTAGATGGACC[CG]AAAGAGACC[[CG]]AGGTGACTT[CG]
GGCTGGGCAGGACACCCC[CG]GGAGTTGCCAG[CG]GCTCTCAG
[CG]GG[CG]CCTCTAGGACCCCTTGTCACTG[CG]AGCAG[CG]
CCTGCTCTGGGGAGGGGCT[CG]AAGG[CG]C[CG][CG]CCTTC
TCAA[CG][CG]C[CG]CTG[CG]TCCCCCAGGGGCTCCAAC
SEQ ID NO: 5095
G[CG][CG][CG]GG[CG][CG]GCTCTGGGAG[CG]GGGGAAGG
TGAGGGGAAATGGGACATGATGGCATTAATAAT[CG]TTACCAAA
GA[CG]GTGGGAGTAACAAAGGAATG[CG]TCTC[CG]AGA[CG]
C[CG]CCCAGCCC[CG]GGGTGTTTTCTGG[CG][CG]GT[CG][
CG]GTGCAGGAA[CG][CG]AGCCC[CG]C[CG]C[CG]AGCCTC
C[CG]C[CG]CCTG[CG]TT[CG]TTGG[CG][CG]G[CG]CC[C
G]G[CG]GTAGTGCCACCC[CG]AGGC[CG]AG[CG]CTGCCCC[
CG]C[CG]GCC[CG][CG]GCTGCCAGC[CG]GCCCTGCC[CG][
CG]CC[CG]GGCCC[[CG]][[CG]]AG[CG]GC[CG]CACTTCA
CCTTA[CG]GAGGGGAGATAATGAGATCAATTAGAGG[CG]C[CG
]TCAC[CG][CG]C[CG]GAGACAGCTGC[CG]C[CG]CATAGTA
ATCACC[CG][CG]GGCTGGGTG[CG][CG]GGGGCTCCC[CG]C
TACCTG[CG][CG]CCTGCTGCTCCCACCA[CG][CG]GCAC[CG
]ACC[CG]GG[CG][CG]CCCC[CG]GCCCCTGTC[CG]CAGCCC
ACAGCCACAC[CG][CG]CACCCTACACCCTCCTTG[CG]CCTCT
GCTGGGGAGCTCACCCCCTCCACT[CG]CACAGTG[CG]CTG[CG
]GCC[CG]GGGTGTGGGAGGTCC[CG]GGACTTGGGGT
SEQ ID NO: 5096
GAGAT[CG]GG[CG][CG][CG]GG[CG][CG]GCTCTGGGAG[C
G]GGGGAAGGTGAGGGGAAATGGGACATGATGGCATTAATAAT[C
G]TTACCAAAGA[CG]GTGGGAGTAACAAAGGAATG[CG]TCTC[
CG]AGA[CG]C[CG]CCCAGCCC[CG]GGGTGTTTTCTGG[CG][
CG]GT[CG][CG]GTGCAGGAA[CG][CG]AGCCC[CG][CG]C[
CG]AGCCTCC[CG]C[CG]CCTG[CG]TT[CG]TTGG[CG][CG]
G[CG]CC[CG]G[CG]GTAGTGCCACCC[CG]AGGC[CG]AG[CG
]CTGCCCC[CG][CG]GCC[CG][CG]GCTGCCAGC[CG]GCCCT
GCC[CG][CG]CC[CG]GGCCC[CG][CG]AG[CG]GC[CG]CAC
TTCACCTTA[CG]GAGGGGAGATAATGAGATCAATTAGAGG[CG]
C[CG]TCAC[CG][CG]C[CG]GAGACAGCTGC[CG]C[CG]CAT
AGTAATCACC[CG][CG]GGCTGGGTG[CG][CG]GGGGCTCCC[
CG]CTACCTG[CG][CG]CCTGCTGCTCCCACCA[CG][CG]GCA
C[CG]ACC[CG]GG[CG][CG]CCCC[CG]GCCCCTGTC[CG]CA
GCCCACAGCCACAC[CG][CG]CACCCTACACCCTCCTTG[CG]C
CTCTGCTGGGGAGCTCACCCCCTCCACT[CG]CACAGTG[CG]CT
G[CG]GCC[CG]GGGTGTGGGAGGTCC[CG]GGA
SEQ ID NO: 5097
TGC[CG]GCCT[CG]GAGTC[CG][CG]G[CG]C[CG]G[CG]GC
TAGAGGTCCAGAGG[[CG]]AACCACTTGCTGGTGCAGAAGAGAA
ACCCTCAAATCCCTGGCCTTT[CG][CG]GAGA[CG]CCTGGA[C
G]GGGC[CG]TG[CG]C[CG]TGGACTGAGCAGG[CG]TCT[CG]
GGGAGCACTTCTGCAGAG[CG]AGGACTTCCATGTGAG[CG]ATT
C[[CG]]TTCTCCCCACCACCAATC[CG]ACCTCCCAGC[CG]TC
TC[CG]C[CG]CC[CG]AGCATCCTTGAGGTGGGA[CG]AGCAGG
GGCTTGGATCCCTGC[CG]GC[CG]TCTGGTGTGTGAGGCTTGCA
[[CG]]GCCCCTGGCTGCCC[CG][CG]CCT[CG]C[CG]GAGCC
[CG]AGGGGG[CG]CAGGTC[CG]GGG[CG]AGGGC[[CG]]GC[
[CG]]GGCTGTTTGATGGCTTCACTGAGAAGAGTCAAAGTGCTGT
TGGTGTTGAACTTGAT[CG][CG]GTAGC[CG]GCTT[CG]TGCT
CTTCCTGGCCAAGTGC[CG]GCCCAT[CG][CG]GTG[CG]CAG[
CG]GAGA[CG]CCTTCCA[CG]AGATC[CG]GC[CG][CG][CG]
C[CG]AGGTGGCCAACCTCAG[CG][CG]CACAG[CG]CCAGCCC
CATCCAGGATG[CG]GTCCTGAAG[CG]CCTGT[CG]CTGCTGGA
GGACAT[CG]TGTA
SEQ ID NO: 5098
TTTTGTGAAA[CG]GGCTAGCTGTCAGC[CG]GGATTGATCACTT
GACTGTGTCAGTTGCAGACAGGGCTGGAAGATATGGCTTTAATTT
TCTTTCTTTCTTTCTTTCTTTAACCACAAAACAAAACACAAAACT
GTTTCCTCAAGCCCCTTGTATTGGGGCCTATTGCAGGTGAAGGGG
GCTGACCAAAGGAAGGAGGTGG[CG]CTGATCCAGAGGAGGCTGA
GTGAGGGGTGGAG[CG]GAGCCCAGC[CG]AGGGAGGGAAGGAGA
GGAA[CG]C[CG]GCCCACTAGC[CG]ACCCCAG[CG]CAACCCA
G[CG][[CG]]GTTCCCAGA[CG]CTGC[CG]GGTAACTGATGC[
CG]C[CG]GCACAGCTTCTGTTCTCACTTGTGGAGCTTTGTCTCC
CCT[CG]CTGGGCAGCCCCTGGTAC[CG]CAACC[CG]CCTGGC[
CG]CCTTCC[CG]GCTGAGGCCCC[CG]GGCAGAGCTCCTC[CG]
CAGGGAGCATTCC[CG]TGGACAAACACCCCTTTCCCTGGTAGCT
GTGGCAACAGTTGATCTGTGGCAG[CG]GACCAGGAGGAGGGTCA
AATGGGAGAAGGGA[[CG]]GCCAGCTGGTCCTACCAGAGACTGT
[CG]CTGG[CG]TCCTCAGGGGC[CG]CTG
SEQ ID NO: 5099
GCCC[CG]C[CG]C[CG]AGCCTCC[CG][CG]CCTG[CG]TT[C
G]TTGG[CG][CG]G[CG]CC[CG]G[CG]GTAGTGCCACCC[CG
]AGGC[CG]AG[CG]CTGCCCC[CG]C[CG]GCC[CG][CG]GCT
GCCAGC[CG]GCCCTGCC[CG][CG]CC[CG]GGCCC[CG][CG]
AG[CG]GC[CG]CACTTCACCTTA[CG]GAGGGGAGATAATGAGA
TCAATTAGAGG[CG]C[CG]TCAC[CG][CG]C[CG]GAGACAGC
TGC[CG]C[CG]CATAGTAATCACC[CG][CG]GGCTGGGTG[CG
][CG]GGGGCTCCC[CG]CTACCTG[CG][CG]CCTGCTGCTCCC
ACCA[CG][CG]GCAC[CG]ACC[CG]GG[CG][CG]CCCC[CG]
GCCCCTGTC[CG]CAGCCCACAGCCACAC[CG][CG]CACCCTAC
ACCCTCCTTG[CG]CCTCTGCTGGGGAGCTCACCCCCTCCACT[C
G]CACAGTG[CG]CTG[CG]GCC[CG]GGGTGTGGGAGGTCC[CG
]GGACTTGGGGTGTGAGTGCCTGTGTGGGGGTAGGGGCAGGTGTC
[CG]CTTGTG[CG]CATATGGGCATGAGTGTACATGG[CG]TGTG
CCTGGAGATGGG[CG]AGTGCAGGCTGGAATGTGC[CG]G[CG]T
GGCA[CG]TGTGTGGGCCCAAATAGATG[CG]TGTGTGATCACAT
GTTGTGTT[CG]T
SEQ ID NO: 5100
TTCCCAAACCCCAACCACAGCT[CG]CTC[CG]CCT[CG]AGGAC
CCCTTTTCTGCACCCCCACCTCAG[CG]CCCTCTTCCTGCACCCA
CAAAGAGAGTACTCAGTCATAGGGGTTCAACAGGAGAGAGGAGAC
AGAAGGTACAGG[CG]GTGAGCAGGGACTCAGCCATCATCCCCCT
CAGGTCCCTCCCCACCCAGTTGACAGAG[CG]AATCC[CG]AGTA
ATTGTTTTC[CG]AGGGGGTC[CG]TG[CG][CG]CT[CG]GTGG
[CG]C[CG]CCT[CG]GTCTGGGTTCCCC[CG]AGGAAAAATACC
CACC[CG][CG]AGGGCT[CG]G[[CG]]GCTTTT[CG]ACT[CG
]G[CG]GGGATGAACTGTGGCAACTT[[CG]]GCAGCCCCCAC[C
G][CG]GTG[CG]GAAGTAAAGAGGGCAACATTGG[CG]ACTG[C
G]GCT[CG]GAGGGGCTGGAG[CG][CG]TGAAGC[CG]TGGGGG
[[CG]]C[CG]TG[CG]CCTCC[CG]CTCTCT[CG]TTT[CG]GC
[CG]CAGGTCCTGGGACTC[CG]ACTT[CG]GTGCTC[CG]GGTG
ATAG[CG]GCTG[CG]G[CG]CCTGCAGTCCAGATCCT[CG]CAG
TTCTG[CG]GG[CG]AAGGAGG[[CG]]AA[CG]GAAT[CG]GCC
CCCAGTGGGGAG[[CG]]CAACAAGCCACAGTAGCCAAACC
SEQ ID NO: 5101
GGCTG[CG]G[CG]CCTGCAGTCCAGATCCT[CG]CAGTTCTG[C
G]GG[CG]AAGGAGG[[CG]]AA[[CG]]GAAT[CG]GCCCCCAG
TGGGGAG[[CG]]CAACAAGCCACAGTAGCCAAACCC[CG][CG]
CTCCTGCC[CG]GGCTCCCAGA[CG]AA[CG]CAGC[CG]CAG[C
G]GGGGGC[CG]GGCCC[CG]AGCCCCA[CG]C[CG]C[CG]C[C
G]C[CG][CG]CCAG[CG]GTGGGGGG[CG]GGCTGGGGG[CG]G
GG[CG]GC[CG]GGGCTGCCTTCC[CG]GG[CG]CATATG[CG]A
G[CG]CAGCACC[CG]G[CG]CTGC[CG]AGCCACCTCCCC[CG]
C[CG]CC[CG]CTAGCAAGTTTGG[[CG]]GCTCCAAGCCAGG[C
G][CG]CCTCAGGATCCAGGCTCATTTGCTTCCACCTAGCTT[CG
]GTGCCCCCTGCTAGG[CG]GGGACCCT[CG]AGAG[CG]ATGC[
CG]ATGGATTTGATTTTAGTTGTGTGGTTCTGTGTGTGCACTGCC
AGGACAGGTAAGCATGACTGTGG[[CG]]GTTAGAGGGATC[CG]
GGAAATGGGGGTGCCCACAGACCA[CG]G[CG]G[CG]TGGGGAG
ACCTGGAGC[CG]AGCTTTG[CG]CTGGTCTGGGGAA[CG]G[CG
]GTAG[CG]TGGAC[CG]GTTCCTGGGATCTCTTTGCCCTGCT[C
G]GAGTGA
SEQ ID NO: 5102
TGGAGAT[CG]GG[CG][CG][CG]GG[CG][CG]GCTCTGGGAG
[CG]GGGGAAGGTGAGGGGAAATGGGACATGATGGCATTAATAAT
[CG]TTACCAAAGA[CG]GTGGGAGTAACAAAGGAATG[CG]TCT
C[CG]AGA[CG]C[CG]CCCAGCCC[CG]GGGTGTTTTCTGG[CG
][CG]GT[CG][CG]GTGCAGGAA[CG][CG]AGCCC[CG]C[CG
]C[CG]AGCCTCC[CG]C[CG]CCTG[CG]TT[CG]TTGG[CG][
CG]G[CG]CC[CG]G[CG]GTAGTGCCACCC[CG]AGGC[CG]AG
[CG]CTGCCCC[CG]C[CG]GCC[CG][CG]GCTGCCAGC[CG]G
CCCTGCC[CG][CG]CC[CG]GGCCC[CG][CG]AG[CG]GC[CG
]CACTTCACCTTA[CG]GAGGGGAGATAATGAGATCAATTAGAGG
[CG]C[CG]TCAC[CG][CG][CG]GAGACAGCTGC[CG]C[CG]
CATAGTAATCACC[CG][CG]GGCTGGGTG[CG][CG]GGGGCTC
CC[CG]CTACCTG[CG][CG]CCTGCTGCTCCCACCA[CG][CG]
GCAC[CG]ACC[CG]GG[CG][[CG]]CCCC[CG]GCCCCTGTC[
CG]CAGCCCACAGCCACAC[CG][CG]CACCCTACACCCTCCTTG
[CG]CCTCTGCTGGGGAGCTCACCCCCTCCACT[CG]CACAGTG[
CG]CTG[CG]GCC[CG]GGGTGTGGGAGGTCC[CG]G
SEQ ID NO: 5103
[CG]GTGCTC[CG]GGTGATAG[CG]GCTG[CG]G[CG]CCTGCA
GTCCAGATCCT[CG]CAGTTCTG[CG]GG[CG]AAGGAGG[[CG]
]AA[[CG]]GAAT[CG]GCCCCCAGTGGGGAG[CG]CAACAAGCC
ACAGTAGCCAAACCC[CG][CG]CTCCTGCC[CG]GGCTCCCAGA
[CG]AA[CG]CAGC[CG]CAG[CG]GGGGGC[CG]GGCCC[CG]A
GCCCCA[CG]C[CG]C[CG]C[CG]C[CG][CG]CCAG[CG]GTG
GGGGG[CG]GGCTGGGGG[CG]GGG[CG]GC[CG]GGGCTGCCTT
CC[CG]GG[CG]CATATG[CG]AG[[CG]]CAGCACC[CG]G[CG
]CTGC[CG]AGCCACCTCCCC[CG]C[CG]CC[CG]CTAGCAAGT
TTGG[CG]GCTCCAAGCCAGG[CG][CG]CCTCAGGATCCAGGCT
CATTTGCTTCCACCTAGCTT[CG]GTGCCCCCTGCTAGG[CG]GG
GACCCT[CG]AGAG[CG]ATGC[CG]ATGGATTTGATTTTAGTTG
TGTGGTTCTGTGTGTGCACTGCCAGGACAGGTAAGCATGACTGTG
G[[CG]]GTTAGAGGGATC[CG]GGAAATGGGGGTGCCCACAGAC
CA[CG]G[CG]G[CG]TGGGGAGACCTGGAGC[CG]AGCTTTG[C
G]CTGGTCTGGGGAA[[CG]]G[CG]GTAG[CG]TGGAC[CG]GT
TCCTGGGATCTC
SEQ ID NO: 5104
GGGCTAGCTGTCAGC[CG]GGATTGATCACTTGACTGTGTCAGTT
GCAGACAGGGCTGGAAGATATGGCTTTAATTTTCTTTCTTTCTTT
CTTTCTTTAACCACAAAACAAAACACAAAACTGTTTCCTCAAGCC
CCTTGTATTGGGGCCTATTGCAGGTGAAGGGGGCTGACCAAAGGA
AGGAGGTGG[CG]CTGATCCAGAGGAGGCTGAGTGAGGGGTGGAG
[CG]GAGCCCAGC[CG]AGGGAGGGAAGGAGAGGAA[CG]C[CG]
GCCCACTAGC[CG]ACCCCAG[CG]CAACCCAG[CG][[CG]]GT
TCCCAGA[[CG]]CTGC[CG]GGTAACTGATGC[CG]C[CG]GCA
CAGCTTCTGTTCTCACTTGTGGAGCTTTGTCTCCCCT[CG]CTGG
GCAGCCCCTGGTAC[[CG]]CAACC[CG]CCTGGC[CG]CCTTCC
[CG]GCTGAGGCCCC[CG]GGCAGAGCTCCTC[CG]CAGGGAGCA
TTCC[CG]TGGACAAACACCCCTTTCCCTGGTAGCTGTGGCAACA
GTTGATCTGTGGCAG[CG]GACCAGGAGGAGGGTCAAATGGGAGA
AGGGA[[CG]]GCCAGCTGGTCCTACCAGAGACTGT[CG]CTGG[
CG]TCCTCAGGGGC[CG]CTGCAGGGCCACCT
SEQ ID NO: 5105
TTTCTTTCTTTAACCACAAAACAAAACACAAAACTGTTTCCTCAA
GCCCCTTGTATTGGGGCCTATTGCAGGTGAAGGGGGCTGACCAAA
GGAAGGAGGTGG[CG]CTGATCCAGAGGAGGCTGAGTGAGGGGTG
GAG[CG]GAGCCCAGC[CG]AGGGAGGGAAGGAGAGGAA[CG]C[
CG]GCCCACTAGC[CG]ACCCCAG[CG]CAACCCAG[CG][CG]G
TTCCCAGA[[CG]]CTGC[CG]GGTAACTGATGC[CG]C[CG]GC
ACAGCTTCTGTTCTCACTTGTGGAGCTTTGTCTCCCCT[CG]CTG
GGCAGCCCCTGGTAC[CG]CAACC[CG]CCTGGC[CG]CCTTCC[
CG]GCTGAGGCCCC[CG]GGCAGAGCTCCTC[CG]CAGGGAGCAT
TCC[CG]TGGACAAACACCCCTTTCCCTGGTAGCTGTGGCAACAG
TTGATCTGTGGCAG[CG]GACCAGGAGGAGGGTCAAATGGGAGAA
GGGA[[CG]]GCCAGCTGGTCCTACCAGAGACTGT[CG]CTGG[C
G]TCCTCAGGGGC[CG]CTGCAGGGCCACCTTGTGTGCTTGCCCT
TTCCCCA[CG]GTAGACTGCCC[CG]GGAGGGGGACTGTGCTGCC
TGAATTCTTGTC[CG]GGTGGGACTGGCCT
SEQ ID NO: 5106
ACAGAAGGTACAGG[CG]GTGAGCAGGGACTCAGCCATCATCCCC
CTCAGGTCCCTCCCCACCCAGTTGACAGAG[CG]AATCC[CG]AG
TAATTGTTTTC[CG]AGGGGGTC[CG]TG[CG][CG]CT[CG]GT
GG[CG]C[CG]CCT[CG]GTCTGGGTTCCCC[CG]AGGAAAAATA
CCCACC[CG][CG]AGGGCT[CG]G[CG]GCTTTT[CG]ACT[CG
]G[CG]GGGATGAACTGTGGCAACTT[[CG]]GCAGCCCCCAC[C
G][CG]GTG[CG]GAAGTAAAGAGGGCAACATTGG[CG]ACTG[C
G]GCT[CG]GAGGGGCTGGAG[CG][CG]TGAAGC[CG]TGGGGG
[[CG]]C[CG]TG[CG]CCTCC[CG]CTCTCT[CG]TTT[CG]GC
[CG]CAGGTCCTGGGACTC[CG]ACTT[CG]GTGCTC[CG]GGTG
ATAG[CG]GCTG[CG]G[CG]CCTGCAGTCCAGATCCT[CG]CAG
TTCTG[CG]GG[CG]AAGGAGG[[CG]]AA[CG]GAAT[CG]GCC
CCCAGTGGGGAG[CG]CAACAAGCCACAGTAGCCAAACCC[CG][
CG]CTCCTGCC[CG]GGCTCCCAGA[CG]AA[CG]CAGC[CG]CA
G[CG]GGGGGC[CG]GGCCC[CG]AGCCCCA[CG]C[CG]C[CG]
C[CG]C[CG][CG]CCAG[CG]GTGGGGGG[CG]GGCTGGGGG[C
G]GGG[CG]GC[CG]GGGCTGCCT
SEQ ID NO: 5107
CCCCTTTTCTGCACCCCCACCTCAG[CG]CCCTCTTCCTGCACCC
ACAAAGAGAGTACTCAGTCATAGGGGTTCAACAGGAGAGAGGAGA
CAGAAGGTACAGG[CG]GTGAGCAGGGACTCAGCCATCATCCCCC
TCAGGTCCCTCCCCACCCAGTTGACAGAG[CG]AATCC[CG]AGT
AATTGTTTTC[CG]AGGGGGTC[CG]TG[CG][CG]CT[CG]GTG
G[CG]C[CG]CCT[CG]GTCTGGGTTCCCC[CG]AGGAAAAATAC
CCACC[CG][CG]AGGGCT[CG]G[CG]GCTTTT[CG]ACT[CG]
G[CG]GGGATGAACTGTGGCAACTT[[CG]]GCAGCCCCCAC[CG
][CG]GTG[CG]GAAGTAAAGAGGGCAACATTGG[CG]ACTG[CG
]GCT[CG]GAGGGGCTGGAG[CG][CG]TGAAGC[CG]TGGGGG[
[CG]]C[CG]TG[CG]CCTCC[CG]CTCTCT[CG]TTT[CG]GC[
CG]CAGGTCCTGGGACTC[CG]ACTT[CG]GTGCTC[CG]GGTGA
TAG[CG]GCTG[CG]G[CG]CCTGCAGTCCAGATCCT[CG]CAGT
TCTG[CG]GG[CG]AAGGAGG[[CG]]AA[[CG]]GAAT[CG]GC
CCCCAGTGGGGAG[[CG]]CAACAAGCCACAGTAGCCAAACCC[C
G][CG]CTCCTGCC[CG]GGCTCCCAGA[CG]AA[CG]CAGC[CG
]C
SEQ ID NO: 5108
[CG]GGGCT[CG]GGGCTTTGGTACAGAGGAGCAGCAGAAGC[CG
]C[CG]C[CG]CAGA[CG]CC[CG]GATG[CG]GAGGACCCAGAG
[CG]CTG[CG]CAGCTGAGGAGCACCTGGGGAGCCAC[CG]C[CG
]G[CG]CCAACTTTTGCCATCC[CG]GGAGCCATAG[CG]GCAGA
GAGGGGGTCC[CG]GACC[CG]AGGTGGCAG[[CG]]AGGGGCTC
TGCTTTGGCAGCTGT[CG]GGGCTGGAGCTCAGGACCCCAACTCC
AGCCAAGT[CG]GGC[CG][CG]G[CG]GGGCAGG[CG]TAGGCT
G[CG]CAGGCAGGGGTGGC[CG][CG]GGTGCTGAGCCAGT[CG]
C[CG]C[CG][CG]CAGG[CG]GG[CG]CTGGAGTCTCAGCTACC
TGG[CG][CG]AC[CG]CCAGCAGCACCCAG[CG][CG]GGGC[C
G]GGAGCTGCTGGGGGCCCAGGCTC[[CG]]CTCTCCCCAC[CG]
CTCTGCAC[CG]CTGC[CG]GCTG[CG]GACAGACC[CG]ATG[C
G]CCACCACCAC[CG]CAGTTGCCA[CG]ACCCCCATGGAAT[CG
]CTGG[CG]CCTC[CG]CTC[CG]GTTCTCTAACC[CG]G[CG]C
ACTCTGGGATCCCAAAGCTTGC[CG]TGGGTTGGAGGCTTCCTAC
TCTTTGTG[[CG]]TTGAGGCTTTGACCTGACCCAGAG[CG]CAG
SEQ ID NO: 5109
ATCTCTATCTCCATCATCTCCATCTCCATCATCTCCATCATCTCC
ATCTCCATCTCCTACTCCATCATCTCCATCTCCATCTTCTCCATC
ATCTCCATCTTCTCCATCATCTCCATCTTCTCCATCATCTCCATC
TTCATCATCTCCATTTCCATCATCTCCATCTCCATCATCATCTCT
ATCTCCATCATCTCCATCTCCATCATCTCCATCATCTCCATCTCC
ATCTCCATCTCCATCATCTAC[CG]TCTCCAATCTCCATCTC[CG
]AAGTTATGCCCACTTCCT[CG]AAGTTTGGAGCCA[[CG]][CG
]AACTACACTGCCCAGAAGG[CG]C[CG][CG]C[CG]TGAGC[C
G][CG]ATGCTTGGCCAATGAAAAGAGGTCTACC[CG]AGAGTG[
CG]A[CG][CG]CAATGGG[CG]GGACTTC[CG]G[CG]TCTCCC
CT[CG]G[CG]GTTGCTTT[CG]CTGCCCTCAAGAGAACTCAGCT
TGC[CG]GAAGCTGGTTGTT[CG]CTG[CG]G[CG]ACCAGCTC[
CG]GAAAG[CG][CG]GTGGGGA[[CG]][CG]CTGTGTTCT[CG
]CAGCTCAGAGG[CG]GGTCTGAGGCT[CG]GTGG[CG]G[CG]C
CCAGGGTGGCC[CG]GGCCCTTTCCT[CG]GT[CG]TTGTCTCAC
[CG]CCA
SEQ ID NO: 5110
TCTCCATCTTCATCATCTCCATTTCCATCATCTCCATCTCCATCA
TCATCTCTATCTCCATCATCTCCATCTCCATCATCTCCATCATCT
CCATCTCCATCTCCATCTCCATCATCTAC[CG]TCTCCAATCTCC
ATCTC[CG]AAGTTATGCCCACTTCCT[CG]AAGTTTGGAGCCA[
CG][CG]AACTACACTGCCCAGAAGG[CG]C[CG][CG]C[CG]T
GAGC[CG][CG]ATGCTTGGCCAATGAAAAGAGGTCTACC[CG]A
GAGTG[CG]A[CG][CG]CAATGGG[CG]GGACTTC[CG]G[CG]
TCTCCCCT[CG]G[CG]GTTGCTTT[[CG]]CTGCCCTCAAGAGA
ACTCAGCTTGC[CG]GAAGCTGGTTGTT[[CG]]CTG[CG]G[CG
]ACCAGCTC[CG]GAAAG[CG][CG]GTGGGGA[[CG]][CG]CT
GTGTTCT[CG]CAGCTCAGAGG[CG]GGTCTGAGGCT[CG]GTGG
[CG]G[CG]CCCAGGGTGGCC[CG]GGCCCTTTCCT[CG]GT[CG
]TTGTCTCAC[CG]CCACAGGCTC[CG]ATGG[CG]G[CG]GCCA
[CG]CTGAGGGACCC[CG]CTCAGGTGAG[CG]C[CG][CG]TCC
TCC[CG]GCCTCCCC[CG]AATCCTAAAGCCCTGTGAGGGC[CG]
CCTGCTCAGGTCCC[CG]GGTGCAGAACTGTGG
SEQ ID NO: 5111
AAGAGAAACCCTCAAATCCCTGGCCTTT[CG][CG]GAGA[CG]C
CTGGA[CG]GGGC[CG]TG[CG]C[CG]TGGACTGAGCAGG[CG]
TCT[CG]GGGAGCACTTCTGCAGAG[CG]AGGACTTCCATGTGAG
[CG]ATTC[[CG]]TTCTCCCCACCACCAATC[CG]ACCTCCCAG
C[CG]TCTC[CG]C[CG]CC[CG]AGCATCCTTGAGGTGGGA[CG
]AGCAGGGGCTTGGATCCCTGC[CG]GC[CG]TCTGGTGTGTGAG
GCTTGCA[[CG]]GCCCCTGGCTGCCC[CG][CG]CCT[CG][CG
]GAGCC[CG]AGGGGG[CG]CAGGTC[CG]GGG[CG]AGGGC[[C
G]]GC[CG]GGCTGTTTGATGGCTTCACTGAGAAGAGTCAAAGTG
CTGTTGGTGTTGAACTTGAT[CG][CG]GTAGC[CG]GCTT[CG]
TGCTCTTCCTGGCCAAGTGC[CG]GCCCAT[CG][CG]GTG[CG]
CAG[CG]GAGA[CG]CCTTCCA[CG]AGATC[CG]GC[CG][CG]
[CG]C[CG]AGGTGGCCAACCTCAG[CG][CG]CACAG[CG]CCA
GCCCCATCCAGGATG[CG]GTCCTGAAG[CG]CCTGT[CG]CTGC
TGGAGGACAT[CG]TGTAC[CG]GCAGCTGAATGGTAAGGA[CG]
CA[CG]C[CG]G[CG]CCTC[CG]GGGCT[CG]A[CG][CG]GG[
CG]GGC[CG]GGCAC
SEQ ID NO: 5112
TCATCATCTCTATCTCCATCATCTCCATCTCCATCATCTCCATCA
TCTCCATCTCCATCTCCATCTCCATCATCTAC[CG]TCTCCAATC
TCCATCTC[CG]AAGTTATGCCCACTTCCT[CG]AAGTTTGGAGC
CA[[CG]][CG]AACTACACTGCCCAGAAGG[CG]C[CG][CG]C
[CG]TGAGC[CG][CG]ATGCTTGGCCAATGAAAAGAGGTCTACC
[CG]AGAGTG[CG]A[CG][CG]CAATGGG[CG]GGACTTC[CG]
G[CG]TCTCCCCT[CG]G[CG]GTTGCTTT[CG]CTGCCCTCAAG
AGAACTCAGCTTGC[CG]GAAGCTGGTTGTT[[CG]]CTG[CG]G
[CG]ACCAGCTC[CG]GAAAG[CG][CG]GTGGGGA[[CG]][CG
]CTGTGTTCT[CG]CAGCTCAGAGG[CG]GGTCTGAGGCT[CG]G
TGG[CG]G[CG]CCCAGGGTGGCC[CG]GGCCCTTTCCT[CG]GT
[CG]TTGTCTCAC[CG]CCACAGGCTC[CG]ATGG[CG]G[CG]G
CCA[CG]CTGAGGGACCC[CG]CTCAGGTGAG[CG]C[CG][CG]
TCCTCC[CG]GCCTCCCC[CG]AATCCTAAAGCCCTGTGAGGGC[
CG]CCTGCTCAGGTCCC[CG]GGTGCAGAACTGTGGGG[CG]TT[
CG]TGGG[CG]G[CG]TCC[CG]TTTCTGACA[CG]CAGTGTGAT
SEQ ID NO: 5113
GCAGAAGAGAAACCCTCAAATCCCTGGCCTTT[CG][CG]GAGA[
CG]CCTGGA[CG]GGGC[CG]TG[CG]C[CG]TGGACTGAGCAGG
[CG]TCT[CG]GGGAGCACTTCTGCAGAG[CG]AGGACTTCCATG
TGAG[CG]ATTC[[CG]]TTCTCCCCACCACCAATC[CG]ACCTC
CCAGC[CG]TCTC[CG]C[CG]CC[CG]AGCATCCTTGAGGTGGG
A[CG]AGCAGGGGCTTGGATCCCTGC[CG]GC[CG]TCTGGTGTG
TGAGGCTTGCA[CG]GCCCCTGGCTGCCC[CG][CG]CCT[CG]C
[CG]GAGCC[CG]AGGGGG[CG]CAGGTC[CG]GGG[CG]AGGGC
[CG]GC[CG]GGCTGTTTGATGGCTTCACTGAGAAGAGTCAAAGT
GCTGTTGGTGTTGAACTTGAT[CG][CG]GTAGC[CG]GCTT[CG
]TGCTCTTCCTGGCCAAGTGC[CG]GCCCAT[CG][CG]GTG[CG
]CAG[CG]GAGA[CG]CCTTCCA[CG]AGATC[CG]GC[CG][CG
][CG]C[CG]AGGTGGCCAACCTCAG[CG][CG]CACAG[CG]CC
AGCCCCATCCAGGATG[CG]GTCCTGAAG[CG]CCTGT[CG]CTG
CTGGAGGACAT[CG]TGTAC[CG]GCAGCTGAATGGTAAGGA[CG
]CA[CG]C[CG]G[CG]CCTC[CG]GGGCT[CG]A[CG][CG]GG
[CG]GGC[CG]G
SEQ ID NO: 5114
TCTCCATCATCTCCATCTCCATCTCCATCTCCATCATCTAC[CG]
TCTCCAATCTCCATCTC[CG]AAGTTATGCCCACTTCCT[CG]AA
GTTTGGAGCCA[[CG]][CG]AACTACACTGCCCAGAAGG[CG]C
[CG][CG]C[CG]TGAGC[CG][CG]ATGCTTGGCCAATGAAAAG
AGGTCTACC[CG]AGAGTG[CG]A[CG][CG]CAATGGG[CG]GG
ACTTC[CG]G[CG]TCTCCCCT[CG]G[CG]GTTGCTTT[CG]CT
GCCCTCAAGAGAACTCAGCTTGC[CG]GAAGCTGGTTGTT[[CG]
]CTG[CG]G[CG]ACCAGCTC[CG]GAAAG[CG][CG]GTGGGGA
[[CG]][CG]CTGTGTTCT[CG]CAGCTCAGAGG[CG]GGTCTGA
GGCT[CG]GTGG[CG]G[CG]CCCAGGGTGGCC[CG]GGCCCTTT
CCT[CG]GT[CG]TTGTCTCAC[CG]CCACAGGCTC[CG]ATGG[
CG]G[CG]GCCA[CG]CTGAGGGACCC[CG]CTCAGGTGAG[CG]
C[CG][CG]TCCTCC[CG]GCCTCCCC[CG]AATCCTAAAGCCCT
GTGAGGGC[CG]CCTGCTCAGGTCCC[CG]GGTGCAGAACTGTGG
GG[CG]TT[CG]TGGG[CG]G[CG]TCC[CG]TTTCTGACA[CG]
CAGTGTGATGGGGTGGCAATGGAGGGCAAGGGGCC[CG]GCT[CG
]CAA
SEQ ID NO: 5115
TCT[CG]TTT[CG]GC[CG]CAGGTCCTGGGACTC[CG]ACTT[C
G]GTGCTC[CG]GGTGATAG[CG]GCTG[CG]G[CG]CCTGCAGT
CCAGATCCT[CG]CAGTTCTG[CG]GG[CG]AAGGAGG[[CG]]A
A[CG]GAAT[[CG]]GCCCCCAGTGGGGAG[CG]CAACAAGCCAC
AGTAGCCAAACCC[CG][CG]CTCCTGCC[CG]GGCTCCCAGA[C
G]AA[CG]CAGC[CG]CAG[CG]GGGGGC[CG]GGCCC[CG]AGC
CCCA[CG]C[CG]C[CG]C[CG]C[CG][CG]CCAG[CG]GTGGG
GGG[CG]GGCTGGGGG[CG]GGG[CG]GC[CG]GGGCTGCCTTCC
[CG]GG[CG]CATATG[CG]AG[CG]CAGCACC[CG]G[CG]CTG
C[CG]AGCCACCTCCCC[CG]C[CG]CC[CG]CTAGCAAGTTTGG
[[CG]]GCTCCAAGCCAGG[CG][CG]CCTCAGGATCCAGGCTCA
TTTGCTTCCACCTAGCTT[CG]GTGCCCCCTGCTAGG[CG]GGGA
CCCT[CG]AGAG[CG]ATGC[CG]ATGGATTTGATTTTAGTTGTG
TGGTTCTGTGTGTGCACTGCCAGGACAGGTAAGCATGACTGTGG[
[CG]]GTTAGAGGGATC[CG]GGAAATGGGGGTGCCCACAGACCA
[CG]G[CG]G[CG]TGGGGAGACCTGGAGC[CG]AGCTTTG[CG]
CTGGTCTGGG
SEQ ID NO: 5116
G[CG]CTGCTTTTC[CG][CG]CTCAGTGATCCAGTTAGGAGCTC
TCCC[CG]CAGCAGCTG[CG][CG]GGACTTTGCATTCCAGATGT
CCCCAGCCCTCCAGGCTAAAGCAG[CG]GCCACCTGAAGTTGAGG
AATGGGG[CG]TGA[CG]ACCACCAGGTCC[CG]CAGTGACCA[C
G]GGAGGGTGGGGAGAAGGAGTCCAGCTC[CG]CCTTGAG[CG]T
[CG]GGTCCCTGGGCAGGACCCTC[CG]GGCCA[CG]GGC[CG]C
TGTC[CG]TTGGGCACC[CG]GGCAGGAGTCTG[CG]AA[CG]CT
GAGTTTCTCTGGAAAGG[CG][CG]GACCCC[[CG]]GAGGAGC[
CG]TCCCAGC[CG]CCTGGGGAGA[CG]CCCCCTCCTCTCC[CG]
GTCTTCTTTCC[CG]GGCACACCCTCCCTAGCC[CG]GG[CG]GG
GGGGTTCTCCATCTGC[CG]CCCCTCC[CG]G[CG]GGCAGG[CG
]AACTCTCTCCTAC[CG]CACCCTCAATCTGTC[CG][CG]GT[C
G][CG]GGGCT[CG]G[CG]GGGG[CG]GGGCC[CG]GG[CG]GG
GG[CG]GGGG[CG]GGGC[CG]GGGG[CG]GGG[CG]GGC[CG]G
[CG]GCTG[CG]GAGGCTG[CG]GAGGCTG[CG]GGAGAAAAGTT
GTCC[CG]GC[CG]GAG[CG][CG]AGCAG[CG]G[CG]GAGC[C
G]GAGC
SEQ ID NO: 5117
AGGGGCACAGCCTGGAGCTTGCTACTCTCTAGGATCTGTTGTCAA
AGCAGTTTGCAAAAACAGTCAGGCAAAACCTTGAGG[CG]TA[CG
]TA[CG]TTATCACCCA[CG]GATAT[CG][CG]AAAGACACAGC
TTAGCCCAGAGCCTATGCTAAGAACCCTCATCCACCATCTGAGGG
GCAGGAGG[CG][CG]CAAGGTGTC[CG]AAGGGGCATGGGAATT
CCTATAAGAAA[CG]GTCCCTTCTGGATAGT[CG]GAACATAGAG
GAAAA[CG]GGGGTGGGTTAGGGGAACACTTACTCTTGTGGGGCC
CTG[CG]CTGG[[CG]]AATGTCAAGCCTCCAGGTTCACAAATGG
CTGGAGGTGCT[CG]GGGTTAGCTCC[CG]AGGG[CG]GCAAG[C
G]C[CG]AC[CG]GTCCT[CG]CT[CG]CTAGGCAGG[CG]CCTC
[CG]GATTC[CG]TTCATGCCTCT[CG]GAGCTACAGGGCTTGGT
G[CG]GAGA[CG]CAGGG[CG]GG[[CG]][CG]CTGGGCTCTGG
GTGTC[[CG]]CAACCCAAAGTGCAGCTGGTGTCTTGA[CG]CTA
C[[CG]]TCTATGCACAAGC[CG]G[CG]G[CG]G[CG]G[[CG]
]GAGCTTGGAGGAGGCAGGGAGATTCCAAATAAATCCACTAATTC
TGGGCTGAG[CG]CT
SEQ ID NO: 5118
ACTAATCAATTTGAGATGACTTCCCCCTCATTCCCAAAGCTAGAG
GAGGAAGGGGGCTGAAAGGGGCTCAGAGCAGTGGAAGGTCCCAGG
CCCAGCTGGGGTTGGGA[[CG]]TGTGTGTGTGTGTGTGTGTGTG
TGTGTGTGTGTGTGTGTGTGTAGAGGGGTGGGTTC[CG]GGGGGG
TGGTGGAAGAGGGC[CG]AGGGGGGAGGATAGAAGGAGGGGGTAG
AGTTTCAGGG[CG]GGGAGGGGGG[CG]CTGGGG[CG]CAGTGA[
CG]GGAACCAATGAGCTGCCAACT[[CG]][[CG]][CG]TCTC[
CG]G[[CG]]TGACTGC[[CG]]AGATTGA[CG]TGGAGGACA[C
G]TCAAATTGATTCC[[CG]]CA[CG]CTGCAGCCTCC[CG]GTC
AGA[CG]AATTTCTCCCAAT[CG]GATGAAGTTCACCCTGGGCCT
GGGGT[[CG]][CG]GG[CG]TGGAGAGTGTCCTGGGAGGGGGCA
GCAG[CG]G[CG]G[CG]GCAGGCCCTGGAG[CG]GG[CG]GCAG
[CG][CG]CTC[CG]CTGC[CG][CG]CACAG[CG][CG]TCTCC
AGCC[CG][CG]GCTGGGC[CG]C[CG][CG]GCTCT[CG]GCTC
T[CG]GG[CG]CCCTCCCTCTATGCCTCTCA[CG][CG]G[CG]G
[CG]G[CG]G[CG]CCCAAGCTCTCC[CG]GACTG[CG]CC
SEQ ID NO: 5119
TTCCCCCTCATTCCCAAAGCTAGAGGAGGAAGGGGGCTGAAAGGG
GCTCAGAGCAGTGGAAGGTCCCAGGCCCAGCTGGGGTTGGGA[[C
G]]TGTGTGTGTGTGTGTGTGTGTGTGTGTGTGTGTGTGTGTGTG
TAGAGGGGTGGGTTC[CG]GGGGGGTGGTGGAAGAGGGC[CG]AG
GGGGGAGGATAGAAGGAGGGGGTAGAGTTTCAGGG[CG]GGGAGG
GGGG[CG]CTGGGG[CG]CAGTGA[CG]GGAACCAATGAGCTGCC
AACT[[CG]][[CG]][CG]TCTC[CG]G[CG]TGACTGC[CG]A
GATTGA[[CG]]TGGAGGACA[CG]TCAAATTGATTCC[[CG]]C
A[CG]CTGCAGCCTCC[CG]GTCAGA[CG]AATTTCTCCCAAT[C
G]GATGAAGTTCACCCTGGGCCTGGGGT[[CG]][CG]GG[CG]T
GGAGAGTGTCCTGGGAGGGGGCAGCAG[CG]G[CG]G[CG]GCAG
GCCCTGGAG[CG]GG[CG]GCAG[CG][CG]CTC[CG]CTGC[CG
][CG]CACAG[CG][CG]TCTCCAGCC[CG][CG]GCTGGGC[CG
]C[CG][CG]GCTCT[CG]GCTCT[CG]GG[CG]CCCTCCCTCTA
TGCCTCTCA[CG][CG]G[CG]G[CG]G[CG]G[CG]CCCAAGCT
CTCC[CG]GACTG[CG]C[CG]GGCCCAGCCC[CG]GCCACCC
SEQ ID NO: 5120
TTTGAGATGACTTCCCCCTCATTCCCAAAGCTAGAGGAGGAAGGG
GGCTGAAAGGGGCTCAGAGCAGTGGAAGGTCCCAGGCCCAGCTGG
GGTTGGGA[[CG]]TGTGTGTGTGTGTGTGTGTGTGTGTGTGTGT
GTGTGTGTGTGTAGAGGGGTGGGTTC[CG]GGGGGGTGGTGGAAG
AGGGC[CG]AGGGGGGAGGATAGAAGGAGGGGGTAGAGTTTCAGG
G[CG]GGGAGGGGGG[CG]CTGGGG[CG]CAGTGA[CG]GGAACC
AATGAGCTGCCAACT[[CG]][[CG]][CG]TCTC[CG]G[[CG]
]TGACTGC[[CG]]AGATTGA[CG]TGGAGGACA[CG]TCAAATT
GATTCC[CG]CA[CG]CTGCAGCCTCC[CG]GTCAGA[CG]AATT
TCTCCCAAT[CG]GATGAAGTTCACCCTGGGCCTGGGGT[[CG]]
[CG]GG[CG]TGGAGAGTGTCCTGGGAGGGGGCAGCAG[CG]G[C
G]G[CG]GCAGGCCCTGGAG[CG]GG[CG]GCAG[CG][CG]CTC
[CG]CTGC[CG][CG]CACAG[CG][CG]TCTCCAGCC[CG][CG
]GCTGGGC[CG]C[CG][CG]GCTCT[CG]GCTCT[CG]GG[CG]
CCCTCCCTCTATGCCTCTCA[CG][CG]G[CG]G[CG]G[CG]G[
[CG]]CCCAAGCTCTCC[CG]GACTG[CG]C[CG]GGCCCAGC
SEQ ID NO: 5121
TACTAACACACTAATCAATTTGAGATGACTTCCCCCTCATTCCCA
AAGCTAGAGGAGGAAGGGGGCTGAAAGGGGCTCAGAGCAGTGGAA
GGTCCCAGGCCCAGCTGGGGTTGGGA[[CG]]TGTGTGTGTGTGT
GTGTGTGTGTGTGTGTGTGTGTGTGTGTGTAGAGGGGTGGGTTC[
CG]GGGGGGTGGTGGAAGAGGGC[CG]AGGGGGGAGGATAGAAGG
AGGGGGTAGAGTTTCAGGG[CG]GGGAGGGGGG[CG]CTGGGG[C
G]CAGTGA[CG]GGAACCAATGAGCTGCCAACT[[CG]][[CG]]
[CG]TCTC[CG]G[[CG]]TGACTGC[[CG]]AGATTGA[[CG]]
TGGAGGACA[[CG]]TCAAATTGATTCC[[CG]]CA[CG]CTGCA
GCCTCC[CG]GTCAGA[CG]AATTTCTCCCAAT[CG]GATGAAGT
TCACCCTGGGCCTGGGGT[CG][CG]GG[CG]TGGAGAGTGTCCT
GGGAGGGGGCAGCAG[CG]G[CG]G[CG]GCAGGCCCTGGAG[CG
]GG[CG]GCAG[CG][CG]CTC[CG]CTGC[CG][CG]CACAG[C
G][CG]TCTCCAGCC[CG][CG]GCTGGGC[CG]C[CG][CG]GC
TCT[CG]GCTCT[CG]GG[CG]CCCTCCCTCTATGCCTCTCA[CG
][CG]G[CG]G[CG]G[CG]G[[CG]]CCCAAGCTCTCC
SEQ ID NO: 5122
G[CG]AGCCTTTACCTGCCAGGCTGCC[CG]GCCTCTGGAGGGTG
GC[CG]TGGCATACAGCTCCTG[CG]AGTGCTTGCTGTACTGCT[
CG]GA[CG][CG]TGGACCAGG[CG]CTTGGTGGG[CG]ACAGGG
TGG[[CG]]TA[CG]TGC[CG]ATGGTGGAGCTCAGCTGGTGGAT
GGG[CG]AGGAGGAGATGGTGGACTGCA[CG]GTGGGGGG[CG]A
GGTCA[CG][CG]GAT[CG]GGGACAGGC[CG]GC[CG]AGGACA
[CG]A[CG]ATGTTGATGGG[CG]AGCTGGTGCTGTAGGACTTGG
CCAGG[CG]GCTGGG[CG]ACTGCTTGGG[CG]AGGAGC[CG][[
CG]][CG]G[CG][CG]G[CG]TAGGTGG[CG]CCCT[CG]GGGG
C[CG]AGC[CG]C[CG][CG]CTGCAGCTTGGTGGG[CG]AAC[C
G]CCCTGGGG[CG][CG]GCCAG[CG]GGGAGCCCC[CG][CG][
CG]G[CG]G[CG][CG]GGCAG[CG]TGGAGCTGGAGTAGTAGAG
[CG][CG]G[CG]G[CG]G[CG]G[CG]G[CG]GG[CG]G[CG][
CG]T[CG]GGCAGGTGGAAGG[CG]CTGCCCAGGCTGGG[CG][C
G]AA[CG]GCTCC[CG][CG]G[CG]G[CG]G[CG]G[CG]G[CG
]G[CG]G[CG][CG]GGCT[CG]GGCCC[CG]CCAGGTGGC[CG]
G[CG][CG]GCTGGT[CG]TGCCCTGTGCC[CG]GGAGAGGAGAG
AAC
SEQ ID NO: 5123
AAA[CG]AGTACTAGTACTAACACACTAATCAATTTGAGATGACT
TCCCCCTCATTCCCAAAGCTAGAGGAGGAAGGGGGCTGAAAGGGG
CTCAGAGCAGTGGAAGGTCCCAGGCCCAGCTGGGGTTGGGA[[CG
]]TGTGTGTGTGTGTGTGTGTGTGTGTGTGTGTGTGTGTGTGTGT
AGAGGGGTGGGTTC[CG]GGGGGGTGGTGGAAGAGGGC[CG]AGG
GGGGAGGATAGAAGGAGGGGGTAGAGTTTCAGGG[CG]GGGAGGG
GGG[CG]CTGGGG[CG]CAGTGA[CG]GGAACCAATGAGCTGCCA
ACT[CG][CG][CG]TCTC[CG]G[CG]TGACTGC[CG]AGATTG
A[[CG]]TGGAGGACA[[CG]]TCAAATTGATTCC[CG]CA[CG]
CTGCAGCCTCC[CG]GTCAGA[CG]AATTTCTCCCAAT[CG]GAT
GAAGTTCACCCTGGGCCTGGGGT[[CG]][CG]GG[CG]TGGAGA
GTGTCCTGGGAGGGGGCAGCAG[CG]G[CG]G[CG]GCAGGCCCT
GGAG[CG]GG[CG]GCAG[CG][CG]CTC[CG]CTGC[CG][CG]
CACAG[CG][CG]TCTCCAGCC[CG][CG]GCTGGGC[CG]C[CG
][CG]GCTCT[CG]GCTCT[CG]GG[CG]CCCTCCCTCTATGCCT
CTCA[CG][CG]G[CG]G[CG]G[CG]G[CG]C
SEQ ID NO: 5124
GGGA[[CG]]TGTGTGTGTGTGTGTGTGTGTGTGTGTGTGTGTGT
GTGTGTGTAGAGGGGTGGGTTC[CG]GGGGGGTGGTGGAAGAGGG
C[CG]AGGGGGGAGGATAGAAGGAGGGGGTAGAGTTTCAGGG[CG
]GGGAGGGGGG[CG]CTGGGG[CG]CAGTGA[CG]GGAACCAATG
AGCTGCCAACT[[CG]][[CG]][CG]TCTC[CG]G[[CG]]TGA
CTGC[CG]AGATTGA[CG]TGGAGGACA[CG]TCAAATTGATTCC
[[CG]]CA[CG]CTGCAGCCTCC[CG]GTCAGA[CG]AATTTCTC
CCAAT[CG]GATGAAGTTCACCCTGGGCCTGGGGT[[CG]][CG]
GG[CG]TGGAGAGTGTCCTGGGAGGGGGCAGCAG[CG]G[CG]G[
CG]GCAGGCCCTGGAG[CG]GG[CG]GCAG[CG][CG]CTC[CG]
CTGC[CG][CG]CACAG[CG][CG]TCTCCAGCC[CG][CG]GCT
GGGC[CG]C[CG][CG]GCTCT[CG]GCTCT[CG]GG[CG]CCCT
CCCTCTATGCCTCTCA[CG][CG]G[CG]G[CG]G[CG]G[[CG]
]CCCAAGCTCTCC[CG]GACTG[CG]C[CG]GGCCCAGCCC[CG]
GCCACCC[CG]GCCACCC[CG]G[CG]CCAGGCAGCTGGC[CG]G
CC[CG]CT[CG]CTATGGGTAAGGGG[CG]GG[CG]ACAGGCAGG
GCT[CG]GGAGGGCTGAT
SEQ ID NO: 5125
AAAGCTAGAGGAGGAAGGGGGCTGAAAGGGGCTCAGAGCAGTGGA
AGGTCCCAGGCCCAGCTGGGGTTGGGA[[CG]]TGTGTGTGTGTG
TGTGTGTGTGTGTGTGTGTGTGTGTGTGTGTAGAGGGGTGGGTTC
[CG]GGGGGGTGGTGGAAGAGGGC[CG]AGGGGGGAGGATAGAAG
GAGGGGGTAGAGTTTCAGGG[CG]GGGAGGGGGG[CG]CTGGGG[
CG]CAGTGA[CG]GGAACCAATGAGCTGCCAACT[[CG]][[CG]
][CG]TCTC[CG]G[CG]TGACTGC[CG]AGATTGA[[CG]]TGG
AGGACA[CG]TCAAATTGATTCC[CG]CA[CG]CTGCAGCCTCC[
CG]GTCAGA[CG]AATTTCTCCCAAT[CG]GATGAAGTTCACCCT
GGGCCTGGGGT[[CG]][CG]GG[CG]TGGAGAGTGTCCTGGGAG
GGGGCAGCAG[CG]G[CG]G[CG]GCAGGCCCTGGAG[CG]GG[C
G]GCAG[CG][CG]CTC[CG]CTGC[CG][CG]CACAG[CG][CG
]TCTCCAGCC[CG][CG]GCTGGGC[CG]C[CG][CG]GCTCT[C
G]GCTCT[CG]GG[CG]CCCTCCCTCTATGCCTCTCA[CG][CG]
G[CG]G[CG]G[CG]G[CG]CCCAAGCTCTCC[CG]GACTG[CG]
C[CG]GGCCCAGCCC[CG]GCCACCC[CG]GCCACCC[CG]G[CG
]C
SEQ ID NO: 5126
GAGCCTTTACCTGCCAGGCTGCC[CG]GCCTCTGGAGGGTGGC[C
G]TGGCATACAGCTCCTG[CG]AGTGCTTGCTGTACTGCT[CG]G
A[CG][CG]TGGACCAGG[CG]CTTGGTGGG[CG]ACAGGGTGG[
[CG]]TA[CG]TGC[CG]ATGGTGGAGCTCAGCTGGTGGATGGG[
CG]AGGAGGAGATGGTGGACTGCA[CG]GTGGGGGG[CG]AGGTC
A[CG][CG]GAT[CG]GGGACAGGC[CG]GC[CG]AGGACA[CG]
A[CG]ATGTTGATGGG[CG]AGCTGGTGCTGTAGGACTTGGCCAG
G[CG]GCTGGG[CG]ACTGCTTGGG[CG]AGGAGC[[CG]][[CG
]][CG]G[CG][CG]G[CG]TAGGTGG[CG]CCCT[CG]GGGGC[
CG]AGC[CG]C[CG][CG]CTGCAGCTTGGTGGG[CG]AAC[CG]
CCCTGGGG[CG][CG]GCCAG[CG]GGGAGCCCC[CG][CG][CG
]G[CG]G[CG][CG]GGCAG[CG]TGGAGCTGGAGTAGTAGAG[C
G][CG]G[CG]G[CG]G[CG]G[CG]G[CG]GG[CG]G[CG][CG
]T[CG]GGCAGGTGGAAGG[CG]CTGCCCAGGCTGGG[CG][CG]
AA[CG]GCTCC[CG][CG]G[CG]G[CG]G[CG]G[CG]G[CG]G
[CG]G[CG][CG]GGCT[CG]GGCCC[CG]CCAGGTGGC[CG]G[
CG][CG]GCTGGT[CG]TGCCCTGTGCC[CG]GGAGAGGAGAGAA
CAC
SEQ ID NO: 5127
A[CG]AGTACTAGTACTAACACACTAATCAATTTGAGATGACTTC
CCCCTCATTCCCAAAGCTAGAGGAGGAAGGGGGCTGAAAGGGGCT
CAGAGCAGTGGAAGGTCCCAGGCCCAGCTGGGGTTGGGA[[CG]]
TGTGTGTGTGTGTGTGTGTGTGTGTGTGTGTGTGTGTGTGTGTAG
AGGGGTGGGTTC[CG]GGGGGGTGGTGGAAGAGGGC[CG]AGGGG
GGAGGATAGAAGGAGGGGGTAGAGTTTCAGGG[CG]GGGAGGGGG
G[CG]CTGGGG[CG]CAGTGA[CG]GGAACCAATGAGCTGCCAAC
T[CG][[CG]][CG]TCTC[CG]G[CG]TGACTGC[CG]AGATTG
A[[CG]]TGGAGGACA[CG]TCAAATTGATTCC[CG]CA[CG]CT
GCAGCCTCC[CG]GTCAGA[CG]AATTTCTCCCAAT[CG]GATGA
AGTTCACCCTGGGCCTGGGGT[[CG]][CG]GG[CG]TGGAGAGT
GTCCTGGGAGGGGGCAGCAG[CG]G[CG]G[CG]GCAGGCCCTGG
AG[CG]GG[CG]GCAG[CG][CG]CTC[CG]CTGC[CG][CG]CA
CAG[CG][CG]TCTCCAGCC[CG][CG]GCTGGGC[CG]C[CG][
CG]GCTCT[CG]GCTCT[CG]GG[CG]CCCTCCCTCTATGCCTCT
CA[CG][CG]G[CG]G[CG]G[CG]G[CG]CCC
SEQ ID NO: 5128
GGTCCTGGAGCATCCCCTC[CG][CG]TCCTTCCTCCCTCTGGGG
CTGGGGACAGC[CG]GGATGTCCCAGGCTGAGGTGGCCACCAGC[
CG]AG[CG][CG]GCTGCTAGGA[CG]CTGG[CG]TGGGGAG[CG
][CG]G[CG][CG]GAACTA[CG]GACAGTGAGCCCTGG[CG]CT
[CG]CTGCCCTG[CG]CCTTAATTTGCTGG[CG]G[CG]G[CG]A
TCC[[CG]]GAGGCC[CG]CAGCCAGTCAG[CG]C[CG]TCTCA[
CG]TCAC[CG]CTTCCTGATTC[CG]C[CG]C[CG]GGGG[CG]G
GGC[CG][CG]GGC[CG]GG[CG][CG]GAGGG[CG][CG]CCCA
GGGTG[CG]G[CG]CC[CG][CG]TGGCCTGT[CG]CCC[CG]GC
TGTT[[CG]]GTACCCCAGCACAGGTTCAGGGAAAAGGGTGCCAC
CACTAGGCTGA[CG]CAGCAGCCATGGACATCCCCACCTGGTCTC
ACAGCCC[CG]GG[CG]GGAGGG[CG]GTG[CG][CG]CTGT[CG
]GGAGAGGACACATCAC[CG][CG]GCCTAA[CG]CC[CG]AGAT
C[CG]GGCATGGCCCAGTTGGGGAAGCTATGACCAGACCAGTGGA
AGCCT[CG]GGAGTTCT[CG]CTTTTTCCATTCTTTTTCTTACCT
G[CG]CTCAAAGTTCCAAAAGAAAGTAGGGAAG[CG]CTCAGTAG
AA
SEQ ID NO: 5129
TCCTTCCTCCCTCTGGGGCTGGGGACAGC[CG]GGATGTCCCAGG
CTGAGGTGGCCACCAGC[CG]AG[CG][CG]GCTGCTAGGA[CG]
CTGG[CG]TGGGGAG[CG][CG]G[CG][CG]GAACTA[CG]GAC
AGTGAGCCCTGG[CG]CT[CG]CTGCCCTG[CG]CCTTAATTTGC
TGG[CG]G[CG]G[[CG]]ATCC[CG]GAGGCC[CG]CAGCCAGT
CAG[CG]C[CG]TCTCA[CG]TCAC[CG]CTTCCTGATTC[CG]C
[CG]C[CG]GGGG[CG]GGGC[CG][CG]GGC[CG]GG[CG][CG
]GAGGG[CG][CG]CCCAGGGTG[CG]G[CG]CC[CG][CG]TGG
CCTGT[CG]CCC[CG]GCTGTT[CG]GTACCCCAGCACAGGTTCA
GGGAAAAGGGTGCCACCACTAGGCTGA[CG]CAGCAGCCATGGAC
ATCCCCACCTGGTCTCACAGCCC[CG]GG[CG]GGAGGG[CG]GT
G[CG][CG]CTGT[CG]GGAGAGGACACATCAC[CG][CG]GCCT
AA[CG]CC[CG]AGATC[CG]GGCATGGCCCAGTTGGGGAAGCTA
TGACCAGACCAGTGGAAGCCT[CG]GGAGTTCT[CG]CTTTTTCC
ATTCTTTTTCTTACCTG[CG]CTCAAAGTTCCAAAAGAAAGTAGG
GAAG[CG]CTCAGTAGAATC[CG]G[CG]CCTCTGAGC[CG]G[C
G]CC
SEQ ID NO: 5130
AAACCAGCCATAGACCACT[CG]GGCCCCCT[CG]CCTCCTTTTT
TCCCTGGCTTGCACCCTC[CG]CACAG[CG]GGCTGCAGGTGCTT
CCCATTCAC[CG]CA[CG]GACCC[CG]CAGTGAAGG[CG][CG]
[CG]GCTGCAGC[CG][CG]CCTGCCTG[CG]TTGGGAAG[CG]G
[CG]AAATAGCCAAGT[CG]C[CG]CAGGGAAGGAAAC[CG]GCA
GGAAAACTGGAGGGGCACAGCCTGGAGCTTGCTACTCTCTAGGAT
CTGTTGTCAAAGCAGTTTGCAAAAACAGTCAGGCAAAACCTTGAG
G[CG]TA[CG]TA[CG]TTATCACCCA[CG]GATAT[CG][CG]A
AAGACACAGCTTAGCCCAGAGCCTATGCTAAGAACCCTCATCCAC
CATCTGAGGGGCAGGAGG[CG][CG]CAAGGTGTC[CG]AAGGGG
CATGGGAATTCCTATAAGAAA[CG]GTCCCTTCTGGATAGT[CG]
GAACATAGAGGAAAA[CG]GGGGTGGGTTAGGGGAACACTTACTC
TTGTGGGGCCCTG[CG]CTGG[[CG]]AATGTCAAGCCTCCAGGT
TCACAAATGGCTGGAGGTGCT[CG]GGGTTAGCTCC[CG]AGGG[
CG]GCAAG[CG]C[CG]AC[CG]GTCCT[CG]CT[CG]CTAGGCA
GG[CG]CCT
SEQ ID NO: 5131
CCTC[CG][CG]TCCTTCCTCCCTCTGGGGCTGGGGACAGC[CG]
GGATGTCCCAGGCTGAGGTGGCCACCAGC[CG]AG[CG][CG]GC
TGCTAGGA[CG]CTGG[CG]TGGGGAG[CG][CG]G[CG][CG]G
AACTA[CG]GACAGTGAGCCCTGG[CG]CT[CG]CTGCCCTG[CG
]CCTTAATTTGCTGG[CG]G[CG]G[CG]ATCC[CG]GAGGCC[C
G]CAGCCAGTCAG[CG]C[CG]TCTCA[CG]TCAC[CG]CTTCCT
GATTC[CG]C[CG]C[CG]GGGG[CG]GGGC[CG][CG]GGC[CG
]GG[CG][CG]GAGGG[CG][CG]CCCAGGGTG[CG]G[CG]CC[
CG][[CG]]TGGCCTGT[CG]CCC[CG]GCTGTT[[CG]]GTACC
CCAGCACAGGTTCAGGGAAAAGGGTGCCACCACTAGGCTGA[CG]
CAGCAGCCATGGACATCCCCACCTGGTCTCACAGCCC[CG]GG[C
G]GGAGGG[CG]GTG[CG][CG]CTGT[CG]GGAGAGGACACATC
AC[CG][CG]GCCTAA[CG]CC[CG]AGATC[CG]GGCATGGCCC
AGTTGGGGAAGCTATGACCAGACCAGTGGAAGCCT[CG]GGAGTT
CT[CG]CTTTTTCCATTCTTTTTCTTACCTG[CG]CTCAAAGTTC
CAAAAGAAAGTAGGGAAG[CG]CTCAGTAGAATC[CG]G[CG]CC
TCTGAG
SEQ ID NO: 5132
GTAGAGAATAATTATTGTACCAGGGCC[CG]C[CG]AGGCA[CG]
AGGCACTCTATTTTGTTTTGTAATCA[CG]A[CG]ACTATTATTT
TTAGTCTGATCAATGGGCACAATTTCTAAGCAG[CG]CAGTGGTG
GATGCT[CG]CAAACTTTTG[CG]CAC[CG]CTGGAAACCCACTA
GGTTGAGTTGCAAAA[CG]TAC[CG][CG]TAGA[CG]CCCCTGG
TGG[CG]C[CG]AGAGAAGAGCTAGGCCTGCCCAGCACAGAGC[C
G]GAGAG[CG]T[CG]GGCCTTC[CG]GAAGGGTAAGTTCTC[CG
]CCAAGGGGTCC[CG]AGGGAGCTGGA[[CG]]TCTGAATCTGGA
CTTGCCCCCAGCTT[CG]GGGTT[CG]ATTCTGGGTTTTG[CG][
CG]TCCCCAACCCCCAGGGCTTTC[CG]AAGCATGGCCTGGCTCC
AGGCC[CG]GTCCTGTAAGGACTGGAA[[CG]]GCAGCAAAATGT
GCAGGGAGGCAGT[CG]GC[CG]GCAGAGCTG[CG]G[CG]GGAG
CCAAGGTCAGGCC[CG][CG]GGGAGAG[[CG]]GGCAGCTTCCA
G[CG]C[CG]GCCACAAGCTCCCAGGCCAGCTGGGC[CG]CAGAC
CCCTTTGCTTCCAGAGAGCACAACC[CG][CG]TCCTTTCTCTCA
GCCAGGCTGCAGT
SEQ ID NO: 5133
GCCTCCTCCTC[CG]CTCTGCAGG[CG]GGGAC[CG]CC[CG]G[
CG]CT[CG]GCACC[CG]GCAG[CG][CG]GCCCCCTCCAGCCCC
[CG]GCTCC[CG]GCAGCAGAAGCAGAAGGCAG[CG]CCAGGGGC
[CG]C[CG]C[CG]C[CG]C[CG]AGCTC[CG][CG]GGGCT[CG
]GGAGC[CG]GCCC[CG]G[CG]AGGAGG[CG][CG]GAACCATG
GC[CG]ATGGGGG[CG]AGGG[CG]AAGA[CG]AGATCCAGTTCC
TG[CG]AACTGTAAG[CG]C[CG]TG[CG]T[CG][CG]TGTGCT
GTCAGGGGAAGGGGG[CG]TCAGGGCATCCACTAG[CG]GGGTC[
CG]GGCAGAGTGACAG[[CG]]GGCAG[CG]GGGACT[CG][CG]
GG[CG]GGG[CG]AGGGGGTGCCCCCTGAGGATG[[CG]]GGAGG
AG[CG]GGCATCACCAAGTGTGTGCAGGTGTG[CG]TGTTGGGG[
CG]AGGGAAGGCAAGGG[CG][CG]TGTCTGTG[CG][CG][CG]
TGTGGAAAGCTAGAGGATGGAG[CG][CG]GCTAGC[CG]G[CG]
GCAGG[CG]CC[CG]GGCT[CG]GACC[CG]GGGCAC[CG]GGGA
CAGGAG[CG]T[CG]GAGCTG[CG]GGAAC[CG]GGAGAGGAGGG
GA[CG]GC[CG]GTC[CG]GCCTGCCTGGTGGCA[CG]GCTGGGA
CCTCC[CG]GG[CG]GC[CG]GGGGCAGGG
SEQ ID NO: 5134
CTCCT[CG]C[CG]CTGT[CG]GGCT[CG]TCCTGCTGCTGCTGC
TGCTGCT[CG]T[CG][CG]C[CG]GGGCAGCCAGCTCAATGTGA
G[CG]AGCTGA[CG]C[CG]TCCAGCCATGCCAGTG[CG]CTC[C
G]GCAGCAGTA[CG][CG]CAGCAGTC[CG][CG]CAGCAGT[CG
]G[CG]TC[CG]CCTCCCAGTACCACCAGTGCCACAGCCTGCAGC
C[CG]C[CG]CCAGCCCCA[CG]GGCAGCCT[CG]GCAGTCTGGG
CTC[CG]GGCCCC[CG]CTCT[CG]CACCACCACCACCACC[CG]
CACC[CG]G[CG]CACCACCAGCACCACCAGCCCCAGG[CG][CG
]C[CG][CG]AGAGCAACCCCTTCAC[CG]AAATAGCCATGAGCA
GCTGCAGGTACAA[CG]GGGG[CG]TCATG[CG]GC[CG]CTCAG
CAACTTGAG[CG][CG]TCC[CG]C[CG]GAACCTGCA[CG]AGA
TGGACTCAGAGG[CG]CAGCCCCTGCAGCCCCC[CG][CG]TCTG
T[CG]GAGGAGGTGG[CG]G[CG][CG]TCCTCCC[CG]TCTGCA
GC[CG]CTGC[CG]C[CG]C[CG]C[CG]CTGTTT[CG]TCCTCA
GCCCC[CG]AGAT[CG]TGGTGTCTAAGCC[CG]AGCACAACAAC
TCCAACAACCTGG[CG]CTCTATGGAAC[CG]G[CG]G[CG]GAG
GCAGCACTGG
SEQ ID NO: 5135
CTCAGGCCACA[CG][CG]AGTCC[CG]TGGCCCAG[CG]GGTGC
C[CG]GGCAGGGG[CG]CTCCTCTG[CG][CG]CCC[CG]A[CG]
CCT[CG]C[CG]GCTCC[CG][CG]GCTCCTTACC[CG]C[CG]C
TCT[CG]GG[CG][CG]GGGCTC[CG]CAGCTAGGCCCCTGC[CG
]CC[CG]GTGGC[CG]G[CG]TC[CG][CG]GGGCCC[CG]GGCC
TCATACTCCTCTCCAGACAGGC[CG][CG]GGCTG[CG]GG[CG]
GGGTGGGC[CG]TGGATCC[CG]GG[CG]CCTAGGAC[CG]GGA[
CG][CG]GCAGCAAGG[CG]TGGAGAGAGCCCC[CG]GGGG[CG]
TCCCATGAGG[[CG]]TT[CG]GGAT[[CG]]G[CG]CCTCCTAG
GTG[CG]GGCTGTG[CG]GGCAGTCCTGCTCC[CG]CCCC[CG]G
GGCTGAGCTGG[CG]G[CG]T[CG]GCTTCAGAGCCT[CG]GAGC
[CG]AGC[CG]AGTC[CG]GGGAAG[CG]CTCCTTTCTCAGCTCC
AGC[CG]AAGAGC[CG]CC[CG]GCAGGGAGAGG[CG]GAGTCAC
TGG[CG]CC[CG]GGG[CG]GGGTGTTGGGGAGGGGTGAGTAGGG
ACAGGAGGGAGGGGGTGGAGAGTTGGGCTGCTG[CG]A[CG]CCT
CC[CG]GTGGCTCTGG[CG]GCACCAATG[CG]GGGCAC[CG]GA
GCAGGTGTC[CG]ACTG[CG]GTG
SEQ ID NO: 5136
GCAG[CG][[CG]]GCCCCCTCCAGCCCC[CG]GCTCC[CG]GCA
GCAGAAGCAGAAGGCAG[CG]CCAGGGGC[CG]C[CG]C[CG]C[
CG]C[CG]AGCTC[CG][CG]GGGCT[CG]GGAGC[CG]GCCC[C
G]G[CG]AGGAGG[CG][CG]GAACCATGGC[CG]ATGGGGG[CG
]AGGG[CG]AAGA[CG]AGATCCAGTTCCTG[CG]AACTGTAAG[
CG]C[CG]TG[CG]T[CG][CG]TGTGCTGTCAGGGGAAGGGGG[
CG]TCAGGGCATCCACTAG[CG]GGGTC[CG]GGCAGAGTGACAG
[CG]GGCAG[CG]GGGACT[CG][CG]GG[CG]GGG[CG]AGGGG
GTGCCCCCTGAGGATG[[CG]]GGAGGAG[CG]GGCATCACCAAG
TGTGTGCAGGTGTG[CG]TGTTGGGG[CG]AGGGAAGGCAAGGG[
CG][CG]TGTCTGTG[CG][CG][CG]TGTGGAAAGCTAGAGGAT
GGAG[CG][CG]GCTAGC[CG]G[CG]GCAGG[CG]CC[CG]GGC
T[CG]GACC[CG]GGGCAC[CG]GGGACAGGAG[CG]T[CG]GAG
CTG[CG]GGAAC[CG]GGAGAGGAGGGGA[CG]GC[CG]GTC[CG
]GCCTGCCTGGTGGCA[CG]GCTGGGACCTCC[CG]GG[CG]GC[
CG]GGGGCAGGGTGCAGAGCAGGGTGGCC[CG]TGGGGG[CG][C
G]GGGAG[CG]G[CG]GGAACT[CG]GG
SEQ ID NO: 5137
TTCCTCCTTCAAAACCAAACCAAACCACCACCAACAAAAACTTCT
GTGCTACTCTGGCTTCTCTGGTTTTGTTTGGGAACAGTGGAACCA
AGTTAGCC[CG]GGCCAGGG[CG]CAGATGATGGACTCAGAG[CG
]CCCAGGGACCCTAGAGAGAGGAGCACTCCTCAAGAGCCCCCTGG
CCATCACC[CG]AG[CG]CCCTGGAG[CG]CCATCACC[CG]AA[
CG][CG][CG]CTCCAGGCCCT[CG]AACAAGGCCTCTGGCTGCC
AGAG[CG]AGTGAGGGG[[CG]]CAGAGG[CG]GCAGAGAG[CG]
GAGAGCCC[CG]GTGTCTC[CG][CG]AGGG[CG]G[CG]G[CG]
GCCAGCAGA[CG]G[CG]AT[CG]AGG[CG][CG][CG]CCA[CG
]GCA[CG]GCCAG[CG]CAGACA[CG]C[CG][CG]GGGTCT[CG
]GGC[CG]GAGC[CG]TGCAGC[CG]GGCC[CG]CTGCCTCTTTG
CCCCTCATGGCTC[CG][CG][CG]GGAGGAAAC[CG]GGCCTTC
TC[CG]CC[CG]CCCTCCTCT[CG]CTG[CG]GTGTCCCCAGCAC
CCC[CG]CCC[CG]CCCC[CG][CG][CG]GTCCCCAC[CG]T[C
G][CG]CTCCCCTCCCTCCT[CG]CCCT[CG]CTC[CG][CG]CC
TCCTGTTGGCAGAGATGGCCT[CG]AAGGCCTCTTCCAATTTGAA
SEQ ID NO: 5138
CACACACCCCCTTTCCCTGGGCTGTTATTATTTTTTTTTCCTCCT
TCAAAACCAAACCAAACCACCACCAACAAAAACTTCTGTGCTACT
CTGGCTTCTCTGGTTTTGTTTGGGAACAGTGGAACCAAGTTAGCC
[CG]GGCCAGGG[CG]CAGATGATGGACTCAGAG[CG]CCCAGGG
ACCCTAGAGAGAGGAGCACTCCTCAAGAGCCCCCTGGCCATCACC
[CG]AG[CG]CCCTGGAG[CG]CCATCACC[CG]AA[CG][CG][
CG]CTCCAGGCCCT[CG]AACAAGGCCTCTGGCTGCCAGAG[CG]
AGTGAGGGG[[CG]]CAGAGG[CG]GCAGAGAG[CG]GAGAGCCC
[CG]GTGTCTC[[CG]][CG]AGGG[CG]G[CG]G[CG]GCCAGC
AGA[CG]G[CG]AT[CG]AGG[CG][CG][CG]CCA[CG]GCA[C
G]GCCAG[CG]CAGACA[CG]C[CG][CG]GGGTCT[CG]GGC[C
G]GAGC[CG]TGCAGC[CG]GGCC[CG]CTGCCTCTTTGCCCCTC
ATGGCTC[CG][CG][CG]GGAGGAAAC[CG]GGCCTTCTC[CG]
CC[CG]CCCTCCTCT[CG]CTG[CG]GTGTCCCCAGCACCCC[CG
]CCC[CG]CCCC[CG][CG][CG]GTCCCCAC[CG]T[CG][CG]
CTCCCCTCCCTCCT[[CG]]CCCT[CG]CTC[CG][CG]CCTCCT
GT
SEQ ID NO: 5139
GAATTGGCTAGAGGAGGGATGAGGTGACATTTGGTCTCTGAATG[
CG]TCT[CG]GATCC[CG]GAC[CG][CG]AGATCCAT[CG]CTC
CCAGTG[CG]TGCAGTTATTC[CG]TCCTGCTGTGTGACA[CG]G
GAGAATGG[[CG]][CG]CA[CG]CCTGTGCACCTGCAT[CG]AC
[CG]TGTAGCTGCCTGGGTGACAGCCACCCATTTGTCTATGTTTT
CTTTCCTATTCTAAAGTAAA[CG]ATTAGAAGTGGCCTCATAGAG
TCTTAGGAAGAAACAGTAAGCCCTGTGCCACC[CG]GGGTCACTG
CCTAGCCCTGCCCTC[CG][CG][[CG]]CAC[CG]TC[CG][CG
]TCTC[CG]AGGGCTCCTCCT[CG]GACCTGGACCCTCTGGAG[C
G]GCTT[CG]ACCCTCCCTCTGCCCC[CG]CTGCCTG[CG]TCCA
GACCCCCTCC[CG]GGTGGGCTCCTC[CG]AGGACCTC[CG]CAG
C[CG][CG]GG[CG]AGCTGGGTGCCTG[CG]AGT[CG]C[CG]C
[CG]CAGTCTGAGCCTCTGGTGCCCCTTAG[CG]TTGGCTCT[CG
]GAGTTCTGAGAAGGGAAAGGAGACAGACACTCTGGGAAAATCTG
GGGTCACCT[CG]ATTC[CG]GCTCCTA[CG]CTGGATGC[CG]T
GGGCAAGCAT[CG]GTCTC
SEQ ID NO: 5140
CATTGGTCCAAA[[CG]]GTGTCAGTGAACTTTAGCTGCAAAGAA
ACTACCTCATTTAAAATTTAAGCAGACCACAGGGAGTAGCATTGG
AGGAAAGAGAGGAGATTTTCTCCTTCAACATTTTGAGCATACTGG
AATGCCAACCCCCTAGGTAGGTGCCAGGGCCACCACAGGAACCTG
ACT[[CG]]CAGGAGT[CG]TCCTC[CG]TCTCTA[CG][CG]AA
G[CG]CCCCCT[CG]AGGTGGGCAGGGGGTGG[CG]G[CG]G[CG
]A[CG]GTGG[CG]GAGC[CG]CAGAG[CG]AGCTAGAGAG[CG]
AGAG[[CG]]GTGAGACTCTG[CG]GA[[CG]]TCTTCC[CG]CC
[CG]C[CG][CG]CTC[CG]CCCCACCCAGCCTC[CG]CAGCCT[
CG]GGC[CG]GAT[CG]CC[CG]G[CG]GGGAAGATG[CG]CCTC
AAGAACCAGGTAGAAG[CG]CCT[CG]G[[CG]]CAGGCCC[CG]
CACCCC[CG]ACTCTGCC[CG]CCCTCTGTTA[CG]GACACC[CG
]CTGGGCCA[[CG]]TGGT[CG][CG]ACTGGCTTCTCCCAG[CG
]GCCAGCCTGGCCACCC[CG]ACTCCCAGGGAGGGGGAGAGGGCC
CTTGCAAGAGGATCCTGCCCC[CG][CG]CTGCCCAGACCTGAGG
GCTCCTGG[CG]ACCCCACC[CG]CAGCCCATC
SEQ ID NO: 5141
TGTGCCACC[CG]GGGTCACTGCCTAGCCCTGCCCTC[CG][CG]
[[CG]]CAC[CG]TC[CG][CG]TCTC[CG]AGGGCTCCTCCT[C
G]GACCTGGACCCTCTGGAG[CG]GCTT[CG]ACCCTCCCTCTGC
CCC[CG]CTGCCTG[CG]TCCAGACCCCCTCC[CG]GGTGGGCTC
CTC[CG]AGGACCTC[CG]CAGC[CG][CG]GG[CG]AGCTGGGT
GCCTG[CG]AGT[CG]C[CG]C[CG]CAGTCTGAGCCTCTGGTGC
CCCTTAG[CG]TTGGCTCT[CG]GAGTTCTGAGAAGGGAAAGGAG
ACAGACACTCTGGGAAAATCTGGGGTCACCT[CG]ATTC[[CG]]
GCTCCTA[CG]CTGGATGC[CG]TGGGCAAGCAT[CG]GTCTCCT
TTGATCTGAAGATCCTGCCCACTC[CG]CCCCTTGCCCCTGCCAG
ACC[CG][CG]GGAGCAGCAGGTGG[CG]TGGGTGCCAGA[[CG]
]CTGC[CG]GTG[CG]CAC[CG]AGTGCAG[CG]CTGCCC[CG]G
CT[CG]CCC[CG]GGGGT[CG][CG]TGGGACAG[CG]GTTTG[C
G]GTGT[CG]CCCTCTCTG[CG]GTGCTTTCCAAGGACCCTCATG
CCC[CG]CC[[CG]]GGTGCACATTCACCACATGGGTCTTACTAG
GTGACCTCTTTCTAAGTAAAATGCATTGAGAAA
SEQ ID NO: 5142
TGGCAG[CG][CG]GAGGCTTGGAGAGAAGCCCCATGCTGGCTCC
CATTCAGC[CG]GCC[[CG]]TTTTCCT[CG]AGCTTTGGAAGTT
TCACTCAGC[CG]TGCACTCAATGGCTTCACAAAGCTGATTACAA
GCTTCAG[CG]CATTCCTGAAGGAGCCAAAAG[CG]A[CG]CAGG
TGCAAA[[CG]]AGC[CG]AGGGAGCCCCTTATCC[CG]GTGACA
GAATGGGACAAGCTGGGAAAGGCTTAGACCACACAAGTCCAAGGC
TCACCAGGC[CG]CAGAAAGCCTGCCTTGGGAAC[CG]GGGGTCA
TTATC[CG]CCCTATTCAG[CG]GGGCC[CG]GGGACCCTGGGGG
C[CG]AG[CG]AGGCCAGCC[CG]GG[CG]GGAGCAC[CG]C[CG
]CCAG[CG][CG][CG]C[CG]G[CG]ACAGGGGGGAACCC[CG]
CTGGG[CG]CTG[CG]GCCAGGC[CG]GGGCTCAGGG[CG]CTGG
GCTGTG[CG]TTTGCACAAATCTGTGTTC[CG]G[CG]GGC[CG]
GTGTCAACCCTAGTGGGGACA[CG]GGAGAAAGAGCA[CG]CCAG
TAGGCCA[CG][CG]G[CG][CG]TGGGCAGTG[CG]CAACTTCT
GT[CG]G[CG]TCCAGGCTGTA[CG]GCCA[CG]TTTCAGC[CG]
GTGCCCCCAGGCCATGGACACCCAGCT
SEQ ID NO: 5143
GGTG[CG]GG[CG]GAGGC[CG]G[CG]GGGGG[CG]C[CG]GGG
G[CG]CTG[CG][CG]GCCCTTGG[CG]G[CG]GGGG[CG][CG]
[CG]GGGTGG[CG]GGGGAGGC[CG]AGG[CG]C[CG]GCAGCTT
[CG][CG]C[CG]G[CG]GCTGGAAG[CG]GG[CG]GGCTGCA[C
G]GG[CG]GCT[CG]AGTG[[CG]]GGGACCCCAGCCCCT[CG]C
CCT[CG]TGAG[CG]C[CG]CCCCTGCCACCTGCTGCCAAGTCAC
[CG]GACTGGGGATG[CG]GGGGG[CG]GGGTG[CG]GGGAGAGG
AAAG[CG]C[CG][CG]GGTGGCA[CG]GTGCCTCTGG[CG]ACA
GAGTAGATGGACC[CG]AAAGAGACC[[CG]]AGGTGACTT[CG]
GGCTGGGCAGGACACCCC[CG]GGAGTTGCCAG[[CG]]GCTCTC
AG[CG]GG[CG]CCTCTAGGACCCCTTGTCACTG[CG]AGCAG[C
G]CCTGCTCTGGGGAGGGGCT[CG]AAGG[CG]C[CG][CG]CCT
TCTCAA[CG][CG]C[CG]CTG[[CG]]TCCCCCAGGGGCTCCAA
CTTGGACAGCTAGACTGGAAATACTGCTGCACAAAGTTAGGCTGA
GTT[CG]AAGGACACCAGAGAGGAAG[[CG]]CAAGGAGATGCCC
TTCTC[CG]GAGC[CG]GGCAGAG[CG]CCAGAACTCCTAGA[CG
]GGAAACTTTCCCCCATT
SEQ ID NO: 5144
AGCCCACAACTAGGCTGC[CG]GGAC[CG]GGGAGCCAGACCCCA
GGT[CG]CTCCAACTC[CG]G[CG]AGGG[CG]GGGAGGGGAGTG
ACAGCAGCAACTAG[CG][CG][CG]CTGGCAAAAGCACAGAGTC
T[[CG]]GAATAGGCTAAA[CG]GC[CG]G[CG][CG]GAGGGGT
GGAGGCAAGAGGGGG[CG]GAGGAGGAGTTGCC[CG]AG[CG]GA
GAGGGATGA[CG]TCCTCCAGGGCCTTGGGCTC[CG]AGGAAC[C
G]AAGACTGGTG[CG]CT[CG]C[CG]GGCCC[CG][CG]CACTA
GCTCTGGGGTT[CG]CAGAGG[CG]C[CG][CG]CC[CG]GCTTC
[CG][CG]GCAGCTCCAACACAG[CG][CG]CAGG[CG]GT[CG]
ATCC[CG]GTCAGCTTAAAC[CG]GG[CG]CAAGCCCTCTGTCCC
CCTCAAAGCACCTCTCTGCT[CG]TCCCTAGTCTCCAGGTGCC[C
G]TCTGAGAGTCCCTGT[CG]CCTC[CG]GG[CG]GACC[CG]GC
CAGGCAGCCCC[CG]GT[CG]GGCCAGCCT[CG]CCCCTTCCT[C
G]CTTTCTCCCCCAT[CG]ACCT[CG]AGCCAAGGGCAGG[CG]G
CC[CG]CACC[CG][CG]CCCCTGCCCA[CG]GGGCTAGG[CG]G
[CG]CTCC[CG]GCCTA[CG]CC[CG]GCTGCCAAGAAGAGAAAG
G[CG]C
SEQ ID NO: 5145
[CG]ATTGTGAGGGGCTCTGCTGGAATTTGGCAG[CG][CG]GAG
GCTTGGAGAGAAGCCCCATGCTGGCTCCCATTCAGC[CG]GCC[[
CG]]TTTTCCT[CG]AGCTTTGGAAGTTTCACTCAGC[CG]TGCA
CTCAATGGCTTCACAAAGCTGATTACAAGCTTCAG[CG]CATTCC
TGAAGGAGCCAAAAG[CG]A[CG]CAGGTGCAAA[CG]AGC[CG]
AGGGAGCCCCTTATCC[CG]GTGACAGAATGGGACAAGCTGGGAA
AGGCTTAGACCACACAAGTCCAAGGCTCACCAGGC[CG]CAGAAA
GCCTGCCTTGGGAAC[CG]GGGGTCATTATC[CG]CCCTATTCAG
[CG]GGGCC[CG]GGGACCCTGGGGGC[CG]AG[CG]AGGCCAGC
C[CG]GG[CG]GGAGCAC[CG]C[CG]CCAG[CG][CG][CG]C[
CG]G[CG]ACAGGGGGGAACCC[CG]CTGGG[CG]CTG[CG]GCC
AGGC[CG]GGGCTCAGGG[CG]CTGGGCTGTG[CG]TTTGCACAA
ATCTGTGTTC[CG]G[CG]GGC[CG]GTGTCAACCCTAGTGGGGA
CA[CG]GGAGAAAGAGCA[CG]CCAGTAGGCCA[CG][CG]G[CG
][CG]TGGGCAGTG[CG]CAACTTCTGT[CG]G[CG]TCCAGGCT
GTA[CG]GCCA[CG]TTTCAGC[CG]G
SEQ ID NO: 5146
TCAGCAGCAAACCCCTCTCAACTG[CG]TGGCC[CG][CG]ATCA
ACACTCTCATCTTTGCTTAGTAATGATACATTTCCACCACACATT
TTCTTATACTGCCTTTTACT[CG]ATGACT[CG]TGATACTATTT
TCCTCTCATTCCTTCCCACCTCTACACTGCC[CG][CG]TTACCA
CACACCCATAAAG[CG]ACATCAG[CG]GTCTCCAGGG[CG]GAA
AGGGGTGGAAGCTGACCCT[CG]CCCTTCCCTCCAG[CG]CTGGC
TTCAGGTGTGCCTTCTGCTACCTCCTGTACTG[CG]AACAGGGGC
C[CG]C[CG]AGCTC[CG]GGAGCCCCTAGAAGAGGAAGACTCCT
CTGGCCCCACTAGGTATCATC[CG][CG]CTCTCC[CG]CTTTCC
ACCTG[CG]CCCT[CG]CTTGGGCCAATCTCTGC[CG]CA[CG]T
GTCCATCCCTGAACTGCA[CG]CTATCCTCCACCCC[CG]GGGGG
TTCCTG[CG]CACTGAAAGAC[CG]TTCTC[CG]GCAGGTTTTGG
GATC[CG]G[CG]A[CG]GCTGAC[CG][CG][CG]C[CG]CCCC
CA[CG]CC[CG]GTTCCA[CG]ATGCTGCAATACAGAAAGTTTA[
CG]T[CG]GCCC[CG]ACC[CG][CG][CG]GGACTGCAGGGTC[
CG]C[CG]GAG[CG][CG]GC
SEQ ID NO: 5147
CACACACATGCACACATTTTCT[CG][CG]CTCTCTC[CG]GCTC
TCCTTTGTTTATTTTCTAATCTATATTTTTACTGGAAGATTTCCT
CTTTATTCTCTCC[CG]CCCTCCTACAAG[CG]CTCTTGCTGGC[
CG]TCTGGGTGCACACAC[CG]CTCCCT[CG]ATCACCCCAGCCC
CCTTCCTGGTCTCC[CG]AG[CG][CG]GGGTTTGAAGGTCACCT
CCTTTCCAGTCCC[CG]TG[CG]AGC[CG][CG]CTGC[CG]C[C
G]CCTCCTCCAGCCAGAGT[CG]GTGGGACTGGCTG[CG]CTGCC
CTGAAGTGGTTCTCCAAGCAG[[CG]][CG]GAGGGTGG[[CG]]
GA[CG]G[CG]GA[CG]GAGCCCAGGGGC[CG][CG]T[CG]GGT
GGGGAAACC[CG]AACT[CG][CG]GAGGGGAATCCCTCCCCCTC
[CG]CCCCAGCCCCCCAGCAGCACC[CG][CG]GTGGGG[CG]GG
GG[CG]CTCTGCCAGCCC[CG]GGAACAGCAGAGG[CG]G[CG]G
CACTGGCTGGACCCA[CG][CG][CG][CG]CCTC[CG]GGGCTG
AAGAAGGAAGGAGTGAGC[CG]AGC[CG]AGCACCCCACATCTGG
AGGGGACAGCCAGC[CG]TGGGCCC[CG]CCC[CG]G[[CG]]TC
[CG]GAGCAGGAGAACTC[CG]AGCTTCTTGCCCA
SEQ ID NO: 5148
CACACATTTTCT[CG][CG]CTCTCTC[CG]GCTCTCCTTTGTTT
ATTTTCTAATCTATATTTTTACTGGAAGATTTCCTCTTTATTCTC
TCC[[CG]]CCCTCCTACAAG[CG]CTCTTGCTGGC[CG]TCTGG
GTGCACACAC[CG]CTCCCT[CG]ATCACCCCAGCCCCCTTCCTG
GTCTCC[CG]AG[CG][CG]GGGTTTGAAGGTCACCTCCTTTCCA
GTCCC[CG]TG[CG]AGC[CG][CG]CTGC[CG]C[CG]CCTCCT
CCAGCCAGAGT[CG]GTGGGACTGGCTG[CG]CTGCCCTGAAGTG
GTTCTCCAAGCAG[CG][CG]GAGGGTGG[[CG]]GA[CG]G[CG
]GA[CG]GAGCCCAGGGGC[CG][CG]T[CG]GGTGGGGAAACC[
CG]AACT[CG][CG]GAGGGGAATCCCTCCCCCTC[CG]CCCCAG
CCCCCCAGCAGCACC[CG][CG]GTGGGG[CG]GGGG[CG]CTCT
GCCAGCCC[CG]GGAACAGCAGAGG[CG]G[CG]GCACTGGCTGG
ACCCA[CG][CG][CG][CG]CCTC[CG]GGGCTGAAGAAGGAAG
GAGTGAGC[CG]AGC[CG]AGCACCCCACATCTGGAGGGGACAGC
CAGC[CG]TGGGCCC[CG]CCC[CG]G[[CG]]TC[CG]GAGCAG
GAGAACTC[CG]AGCTTCTTGCCCAGGCAGAGAGA
SEQ ID NO: 5149
CACACACACATGCACACATTTTCT[CG][CG]CTCTCTC[CG]GC
TCTCCTTTGTTTATTTTCTAATCTATATTTTTACTGGAAGATTTC
CTCTTTATTCTCTCC[CG]CCCTCCTACAAG[CG]CTCTTGCTGG
C[CG]TCTGGGTGCACACAC[CG]CTCCCT[CG]ATCACCCCAGC
CCCCTTCCTGGTCTCC[CG]AG[CG][CG]GGGTTTGAAGGTCAC
CTCCTTTCCAGTCCC[CG]TG[CG]AGC[CG][CG]CTGC[CG]C
[CG]CCTCCTCCAGCCAGAGT[CG]GTGGGACTGGCTG[CG]CTG
CCCTGAAGTGGTTCTCCAAGCAG[[CG]][[CG]]GAGGGTGG[[
CG]]GA[CG]G[CG]GA[CG]GAGCCCAGGGGC[CG][CG]T[CG
]GGTGGGGAAACC[CG]AACT[CG][CG]GAGGGGAATCCCTCCC
CCTC[CG]CCCCAGCCCCCCAGCAGCACC[CG][CG]GTGGGG[C
G]GGGG[CG]CTCTGCCAGCCC[CG]GGAACAGCAGAGG[CG]G[
CG]GCACTGGCTGGACCCA[CG][CG][CG][CG]CCTC[CG]GG
GCTGAAGAAGGAAGGAGTGAGC[CG]AGC[CG]AGCACCCCACAT
CTGGAGGGGACAGCCAGC[CG]TGGGCCC[CG]CCC[CG]G[[CG
]]TC[CG]GAGCAGGAGAACTC[CG]AGCTTCTTGCC
SEQ ID NO: 5150
GGTGCC[CG]GGAAC[CG]CT[CG]C[CG]AAGGAGGAAG[CG]C
[CG]TC[CG]TCTGTCCTTCCC[CG]G[CG]G[CG]G[CG]G[CG
]AG[CG]GAG[CG]CAGGAGCCC[CG]CACTCCACACACTCATGC
ACACACACACTCACACACACTCACACACTCTCCCACAACACAATA
CCCTGACACACACTCACA[CG]CA[CG]C[CG]CACTCACAC[CG
]GGTGCCTGGGAAAAT[CG]CAGA[CG]C[CG]GGGAGGAGCAGG
GGG[CG]GTGATGGGAAGGGGAGCTG[CG]AGG[CG]AAGTGTTC
TTCAGGGAAG[CG]GGCT[CG]AGTCTC[[CG]]CAGCTG[CG]G
[[CG]]G[CG]G[CG]G[CG]G[CG][CG]CTGGGC[CG]G[CG]
G[CG]GG[CG][CG]GGCAGGGGGC[CG]GGGGTGC[CG][CG][
CG]GTAGGAGCCTGGCTTGGACAGC[[CG]]AGGAGCAGGAAGTG
GCCTCTGACCCAGGACAC[[CG]]AGCAGGGCTCTCTTGCCTGGA
TT[CG]CCTTTACAAAGTAACT[CG][CG]AAGGTCCC[CG]GAG
GGG[CG]TCAAG[CG]G[CG]ACAG[CG]GCC[CG]CC[CG]CC[
CG]CAGTC[CG]AAGCCCCCAGCCCTGCTGTCTTGCCTTCCCCCA
TTCCATCAGTTGCCATTGCAA[CG]CCAATCCTGTTACA[CG]AT
ACAGACTC
SEQ ID NO: 5151
GGCCAAGC[CG]AGGTGCC[CG]GGAAC[CG]CT[CG]C[CG]AA
GGAGGAAG[CG]C[CG]TC[CG]TCTGTCCTTCCC[CG]G[CG]G
[CG]G[[CG]]G[CG]AG[CG]GAG[CG]CAGGAGCCC[CG]CAC
TCCACACACTCATGCACACACACACTCACACACACTCACACACTC
TCCCACAACACAATACCCTGACACACACTCACA[CG]CA[CG]C[
CG]CACTCACAC[CG]GGTGCCTGGGAAAAT[CG]CAGA[CG]C[
CG]GGGAGGAGCAGGGGG[CG]GTGATGGGAAGGGGAGCTG[CG]
AGG[CG]AAGTGTTCTTCAGGGAAG[CG]GGCT[CG]AGTCTC[[
CG]]CAGCTG[CG]G[[CG]]G[CG]G[CG]G[CG]G[CG][CG]
CTGGGC[CG]G[CG]G[CG]GG[CG][CG]GGCAGGGGGC[CG]G
GGGTGC[CG][CG][CG]GTAGGAGCCTGGCTTGGACAGC[[CG]
]AGGAGCAGGAAGTGGCCTCTGACCCAGGACAC[CG]AGCAGGGC
TCTCTTGCCTGGATT[CG]CCTTTACAAAGTAACT[CG][CG]AA
GGTCCC[CG]GAGGGG[CG]TCAAG[CG]G[CG]ACAG[CG]GCC
[CG]CC[CG]CC[CG]CAGTC[CG]AAGCCCCCAGCCCTGCTGTC
TTGCCTTCCCCCATTCCATCAGTTGCCATTGCAA[CG]CCAATCC
TGTTACAC
SEQ ID NO: 5152
G[CG][CG]GTCAGCA[CG]AGGACCAGCA[CG]ACCA[CG]ACC
TTGG[CG]TTCATGG[CG][CG]GG[CG]GG[CG]GG[CG]GG[C
G]GG[CG]GA[CG]AG[CG][CG]GGT[CG]GGGGC[CG]GA[CG
]C[CG]AG[CG]GGCAATG[CG]GCTGA[CG]GAGAGTGAAAGTG
[CG]G[[CG]]GTGGGAGG[CG][CG][CG]C[CG]GG[CG]CTT
TAGAGGGGAGAGCCAGG[CG]GGG[CG]GGG[CG]GGG[CG][CG
][CG]GTGAGGGG[CG]GGCC[CG]GAGC[CG]AGTGCTGGC[CG
]TGGC[CG]GGGTCTCTGA[CG][CG][CG]ACTCCCT[CG]G[C
G]GCACCCCCCACCCATCCCCTT[CG]CCCCTCCTC[[CG]]CTC
CCTCTGTGCTCC[CG]AGG[CG]CAGTG[CG]CTC[CG]GCCTTT
GACCTTCTCAGGCTC[CG]CTGGGCCC[CG]CAC[CG]CTGGCC[
CG]GTCTGCAGTGAGGTC[CG]CAGCCTGAG[CG]A[[CG]]C[C
G]GCTGGAGGGC[CG]CTTATTGTCCCTGTGACAGGGCCCCACTG
GAGAGACTGAGGACCTTAGG[CG]TAAAGTGGGG[CG][CG][CG
]TGGAAAGCTG[CG]GGA[CG]GGGCCTTT[CG]ATGG[CG]GGA
ACTGAATGAGAACCAATGAAAAGCAAACAAGTTAGTCC[CG]GG[
CG]GAGGGCCTGCTGG[CG]GTGG[CG]GCCC
SEQ ID NO: 5153
CA[CG]ACCA[CG]ACCTTGG[CG]TTCATGG[CG][CG]GG[CG
]GG[CG]GG[CG]GG[CG]GG[CG]GA[CG]AG[CG][CG]GGT[
CG]GGGGC[CG]GA[CG]C[CG]AG[CG]GGCAATG[CG]GCTGA
[CG]GAGAGTGAAAGTG[[CG]]G[CG]GTGGGAGG[CG][CG][
CG]C[CG]GG[CG]CTTTAGAGGGGAGAGCCAGG[CG]GGG[CG]
GGG[CG]GGG[CG][CG][CG]GTGAGGGG[CG]GGCC[CG]GAG
C[CG]AGTGCTGGC[CG]TGGC[CG]GGGTCTCTGA[CG][CG][
CG]ACTCCCT[CG]G[CG]GCACCCCCCACCCATCCCCTT[CG]C
CCCTCCTC[CG]CTCCCTCTGTGCTCC[CG]AGG[[CG]]CAGTG
[CG]CTC[CG]GCCTTTGACCTTCTCAGGCTC[CG]CTGGGCCC[
CG]CAC[CG]CTGGCC[CG]GTCTGCAGTGAGGTC[CG]CAGCCT
GAG[CG]A[CG]C[CG]GCTGGAGGGC[CG]CTTATTGTCCCTGT
GACAGGGCCCCACTGGAGAGACTGAGGACCTTAGG[CG]TAAAGT
GGGG[CG][CG][CG]TGGAAAGCTG[CG]GGA[CG]GGGCCTTT
[CG]ATGG[CG]GGAACTGAATGAGAACCAATGAAAAGCAAACAA
GTTAGTCC[CG]GG[CG]GAGGGCCTGCTGG[CG]GTGG[CG]GC
CCAAGGCAGC[CG]AGGGGGTCCTGC
SEQ ID NO: 5154
GAAA[CG]GTCCCTTCTGGATAGT[CG]GAACATAGAGGAAAA[C
G]GGGGTGGGTTAGGGGAACACTTACTCTTGTGGGGCCCTG[CG]
CTGG[CG]AATGTCAAGCCTCCAGGTTCACAAATGGCTGGAGGTG
CT[CG]GGGTTAGCTCC[CG]AGGG[CG]GCAAG[CG]C[CG]AC
[CG]GTCCT[CG]CT[CG]CTAGGCAGG[CG]CCTC[CG]GATTC
[CG]TTCATGCCTCT[CG]GAGCTACAGGGCTTGGTG[CG]GAGA
[CG]CAGGG[CG]GG[[CG]][CG]CTGGGCTCTGGGTGTC[CG]
CAACCCAAAGTGCAGCTGGTGTCTTGA[CG]CTAC[[CG]]TCTA
TGCACAAGC[CG]G[CG]G[CG]G[CG]G[CG]GAGCTTGGAGGA
GGCAGGGAGATTCCAAATAAATCCACTAATTCTGGGCTGAG[CG]
CTC[[CG]]G[CG]TG[CG]AGCC[CG]CCTGCCTGCCAAATGTA
ACTGTGAAGTGATGTGGAAAAGTGAGC[[CG]]GGTGCCTCCCCT
GA[CG]GATCTCATTGGGCAGAG[CG]CAGAGGCAGGTCTACCAC
TTGGAAATTCATGTAAGCAGTCCCCCCTCCC[CG]CCCCCTCCC[
CG]CCTTCCCCCTT[CG]CTCTCC[CG][CG]CTGGCT[CG]AT[
CG]CTCTCTTTCCCCCTACCCAA
SEQ ID NO: 5155
CATAGAGGAAAA[CG]GGGGTGGGTTAGGGGAACACTTACTCTTG
TGGGGCCCTG[CG]CTGG[[CG]]AATGTCAAGCCTCCAGGTTCA
CAAATGGCTGGAGGTGCT[CG]GGGTTAGCTCC[CG]AGGG[CG]
GCAAG[CG]C[CG]AC[CG]GTCCT[[CG]]CT[CG]CTAGGCAG
G[CG]CCTC[CG]GATTC[CG]TTCATGCCTCT[CG]GAGCTACA
GGGCTTGGTG[CG]GAGA[CG]CAGGG[CG]GG[[CG]][CG]CT
GGGCTCTGGGTGTC[[CG]]CAACCCAAAGTGCAGCTGGTGTCTT
GA[CG]CTAC[[CG]]TCTATGCACAAGC[CG]G[CG]G[CG]G[
CG]G[[CG]]GAGCTTGGAGGAGGCAGGGAGATTCCAAATAAATC
CACTAATTCTGGGCTGAG[CG]CTC[[CG]]G[CG]TG[CG]AGC
C[CG]CCTGCCTGCCAAATGTAACTGTGAAGTGATGTGGAAAAGT
GAGC[[CG]]GGTGCCTCCCCTGA[CG]GATCTCATTGGGCAGAG
[CG]CAGAGGCAGGTCTACCACTTGGAAATTCATGTAAGCAGTCC
CCCCTCCC[CG]CCCCCTCCC[CG]CCTTCCCCCTT[CG]CTCTC
C[CG][CG]CTGGCT[CG]AT[CG]CTCTCTTTCCCCCTACCCAA
GTGGG[CG]CACAACTTTT[CG]CTCCT[CG]C
SEQ ID NO: 5156
GGTGGATGCT[CG]CAAACTTTTG[CG]CAC[CG]CTGGAAACCC
ACTAGGTTGAGTTGCAAAA[CG]TAC[CG][CG]TAGA[CG]CCC
CTGGTGG[CG]C[CG]AGAGAAGAGCTAGGCCTGCCCAGCACAGA
GC[CG]GAGAG[CG]T[CG]GGCCTTC[CG]GAAGGGTAAGTTCT
C[CG]CCAAGGGGTCC[CG]AGGGAGCTGGA[CG]TCTGAATCTG
GACTTGCCCCCAGCTT[CG]GGGTT[CG]ATTCTGGGTTTTG[CG
][CG]TCCCCAACCCCCAGGGCTTTC[CG]AAGCATGGCCTGGCT
CCAGGCC[CG]GTCCTGTAAGGACTGGAA[[CG]]GCAGCAAAAT
GTGCAGGGAGGCAGT[CG]GC[CG]GCAGAGCTG[CG]G[CG]GG
AGCCAAGGTCAGGCC[CG][CG]GGGAGAG[[CG]]GGCAGCTTC
CAG[CG]C[CG]GCCACAAGCTCCCAGGCCAGCTGGGC[CG]CAG
ACCCCTTTGCTTCCAGAGAGCACAACC[CG][CG]TCCTTTCTCT
CAGCCAGGCTGCAGTGGCTGCCC[CG]AGCTT[CG]CTTT[CG]T
TTCCCAAGCTGTTAATAA[CG]ATATGTCCCCAAATC[CG]AGGC
T[CG]TGTTTGCTCCCAGATGCCAAGAA[CG]CAACC[CG]AAAT
CCTTCTCCCAAACCC
SEQ ID NO: 5157
GCAAGGTGTC[CG]AAGGGGCATGGGAATTCCTATAAGAAA[CG]
GTCCCTTCTGGATAGT[CG]GAACATAGAGGAAAA[CG]GGGGTG
GGTTAGGGGAACACTTACTCTTGTGGGGCCCTG[CG]CTGG[[CG
]]AATGTCAAGCCTCCAGGTTCACAAATGGCTGGAGGTGCT[CG]
GGGTTAGCTCC[CG]AGGG[CG]GCAAG[CG]C[CG]AC[CG]GT
CCT[CG]CT[CG]CTAGGCAGG[CG]CCTC[CG]GATTC[CG]TT
CATGCCTCT[CG]GAGCTACAGGGCTTGGTG[CG]GAGA[CG]CA
GGG[CG]GG[CG][CG]CTGGGCTCTGGGTGTC[[CG]]CAACCC
AAAGTGCAGCTGGTGTCTTGA[CG]CTAC[CG]TCTATGCACAAG
C[CG]G[CG]G[CG]G[CG]G[CG]GAGCTTGGAGGAGGCAGGGA
GATTCCAAATAAATCCACTAATTCTGGGCTGAG[CG]CTC[CG]G
[CG]TG[CG]AGCC[CG]CCTGCCTGCCAAATGTAACTGTGAAGT
GATGTGGAAAAGTGAGC[[CG]]GGTGCCTCCCCTGA[CG]GATC
TCATTGGGCAGAG[CG]CAGAGGCAGGTCTACCACTTGGAAATTC
ATGTAAGCAGTCCCCCCTCCC[CG]CCCCCTCCC[CG]CCTTCCC
CCTT[CG]CTCTCCC
SEQ ID NO: 5158
ATCTGAGGGGCAGGAGG[CG][CG]CAAGGTGTC[CG]AAGGGGC
ATGGGAATTCCTATAAGAAA[CG]GTCCCTTCTGGATAGT[CG]G
AACATAGAGGAAAA[CG]GGGGTGGGTTAGGGGAACACTTACTCT
TGTGGGGCCCTG[CG]CTGG[[CG]]AATGTCAAGCCTCCAGGTT
CACAAATGGCTGGAGGTGCT[CG]GGGTTAGCTCC[CG]AGGG[C
G]GCAAG[CG]C[CG]AC[CG]GTCCT[CG]CT[CG]CTAGGCAG
G[CG]CCTC[CG]GATTC[CG]TTCATGCCTCT[CG]GAGCTACA
GGGCTTGGTG[CG]GAGA[CG]CAGGG[CG]GG[[CG]][CG]CT
GGGCTCTGGGTGTC[[CG]]CAACCCAAAGTGCAGCTGGTGTCTT
GA[CG]CTAC[CG]TCTATGCACAAGC[CG]G[CG]G[CG]G[CG
]G[[CG]]GAGCTTGGAGGAGGCAGGGAGATTCCAAATAAATCCA
CTAATTCTGGGCTGAG[CG]CTC[[CG]]G[CG]TG[CG]AGCC[
CG]CCTGCCTGCCAAATGTAACTGTGAAGTGATGTGGAAAAGTGA
GC[[CG]]GGTGCCTCCCCTGA[CG]GATCTCATTGGGCAGAG[C
G]CAGAGGCAGGTCTACCACTTGGAAATTCATGTAAGCAGTCCCC
CCTCCC[CG]CCCCCTCCC
SEQ ID NO: 5159
ACCAGAG[CG]CCCAGCTAAG[CG]AGCTGCCTCCACCCCCACTG
TGT[CG]GG[CG]G[CG]CAAACTG[CG]GG[CG]CAGGCAGAGG
AGC[CG][CG]GCTCTG[CG]C[CG]GG[CG]GGAGC[CG]AAGC
CCAGAGCCT[CG]CCAGGGCCTCCC[CG]C[CG]AG[CG]CACTT
AC[CG]T[CG]CTGAGGCAGAG[CG][CG]GTCAGCA[CG]AGGA
CCAGCA[CG]ACCA[CG]ACCTTGG[CG]TTCATGG[CG][CG]G
G[CG]GG[CG]GG[CG]GG[CG]GG[CG]GA[CG]AG[CG][CG]
GGT[CG]GGGGC[CG]GA[CG]C[CG]AG[CG]GGCAATG[CG]G
CTGA[CG]GAGAGTGAAAGTG[CG]G[CG]GTGGGAGG[CG][CG
][CG]C[CG]GG[CG]CTTTAGAGGGGAGAGCCAGG[CG]GGG[C
G]GGG[CG]GGG[CG][CG][CG]GTGAGGGG[CG]GGCC[CG]G
AGC[CG]AGTGCTGGC[CG]TGGC[CG]GGGTCTCTGA[CG][CG
][CG]ACTCCCT[CG]G[CG]GCACCCCCCACCCATCCCCTT[CG
]CCCCTCCTC[CG]CTCCCTCTGTGCTCC[CG]AGG[CG]CAGTG
[CG]CTC[CG]GCCTTTGACCTTCTCAGGCTC[CG]CTGGGCCC[
CG]CAC[CG]CTGGCC[CG]GTCTGCAGTGAGGTC[CG]CAGCCT
GAG[CG]A[CG]C[CG]GCTGGAGGGC[CG]CTTATTGTC
SEQ ID NO: 5160
CCTGGTGG[CG]C[CG]AGAGAAGAGCTAGGCCTGCCCAGCACAG
AGC[CG]GAGAG[CG]T[CG]GGCCTTC[CG]GAAGGGTAAGTTC
TC[CG]CCAAGGGGTCC[CG]AGGGAGCTGGA[[CG]]TCTGAAT
CTGGACTTGCCCCCAGCTT[CG]GGGTT[CG]ATTCTGGGTTTTG
[CG][CG]TCCCCAACCCCCAGGGCTTTC[CG]AAGCATGGCCTG
GCTCCAGGCC[CG]GTCCTGTAAGGACTGGAA[[CG]]GCAGCAA
AATGTGCAGGGAGGCAGT[CG]GC[CG]GCAGAGCTG[CG]G[CG
]GGAGCCAAGGTCAGGCC[CG][CG]GGGAGAG[[CG]]GGCAGC
TTCCAG[CG]C[CG]GCCACAAGCTCCCAGGCCAGCTGGGC[CG]
CAGACCCCTTTGCTTCCAGAGAGCACAACC[CG][CG]TCCTTTC
TCTCAGCCAGGCTGCAGTGGCTGCCC[CG]AGCTT[CG]CTTT[C
G]TTTCCCAAGCTGTTAATAA[CG]ATATGTCCCCAAATC[CG]A
GGCT[CG]TGTTTGCTCCCAGATGCCAAGAA[CG]CAACC[CG]A
AATCCTTCTCCCAAACCCTAGGT[CG]A[CG]AGATGAGTTCCTA
CTTGACCTCTGAGC[CG]AGGTGGGC[CG]GAAAC[CG]AGGCCT
AGGCCC[CG]C[CG]GG
SEQ ID NO: 5161
[CG]CACCAGAG[CG]CCCAGCTAAG[CG]AGCTGCCTCCACCCC
CACTGTGT[CG]GG[CG]G[CG]CAAACTG[CG]GG[CG]CAGGC
AGAGGAGC[CG][CG]GCTCTG[CG]C[CG]GG[CG]GGAGC[CG
]AAGCCCAGAGCCT[CG]CCAGGGCCTCCC[CG]C[CG]AG[CG]
CACTTAC[CG]T[CG]CTGAGGCAGAG[CG][CG]GTCAGCA[CG
]AGGACCAGCA[CG]ACCA[CG]ACCTTGG[CG]TTCATGG[CG]
[CG]GG[CG]GG[CG]GG[CG]GG[CG]GG[CG]GA[CG]AG[CG
][CG]GGT[CG]GGGGC[CG]GA[CG]C[CG]AG[CG]GGCAATG
[CG]GCTGA[CG]GAGAGTGAAAGTG[[CG]]G[[CG]]GTGGGA
GG[CG][CG][CG]C[CG]GG[CG]CTTTAGAGGGGAGAGCCAGG
[CG]GGG[CG]GGG[CG]GGG[CG][CG][CG]GTGAGGGG[CG]
GGCC[CG]GAGC[CG]AGTGCTGGC[CG]TGGC[CG]GGGTCTCT
GA[CG][CG][CG]ACTCCCT[CG]G[CG]GCACCCCCCACCCAT
CCCCTT[CG]CCCCTCCTC[CG]CTCCCTCTGTGCTCC[CG]AGG
[CG]CAGTG[CG]CTC[CG]GCCTTTGACCTTCTCAGGCTC[CG]
CTGGGCCC[CG]CAC[CG]CTGGCC[CG]GTCTGCAGTGAGGTC[
CG]CAGCCTGAG[CG]A[CG]C[CG]GCTGGAGGGC[CG]CTTAT
T
SEQ ID NO: 5162
AG[CG]AGCTGCCTCCACCCCCACTGTGT[CG]GG[CG]G[CG]C
AAACTG[CG]GG[CG]CAGGCAGAGGAGC[CG][CG]GCTCTG[C
G]C[CG]GG[CG]GGAGC[CG]AAGCCCAGAGCCT[CG]CCAGGG
CCTCCC[CG]C[CG]AG[CG]CACTTAC[CG]T[CG]CTGAGGCA
GAG[CG][CG]GTCAGCA[CG]AGGACCAGCA[CG]ACCA[CG]A
CCTTGG[CG]TTCATGG[CG][CG]GG[CG]GG[CG]GG[CG]GG
[CG]GG[CG]GA[CG]AG[CG][CG]GGT[CG]GGGGC[CG]GA[
CG]C[CG]AG[CG]GGCAATG[CG]GCTGA[CG]GAGAGTGAAAG
TG[[CG]]G[CG]GTGGGAGG[CG][CG][CG]C[CG]GG[CG]C
TTTAGAGGGGAGAGCCAGG[CG]GGG[CG]GGG[CG]GGG[CG][
CG][CG]GTGAGGGG[CG]GGCC[CG]GAGC[CG]AGTGCTGGC[
CG]TGGC[CG]GGGTCTCTGA[CG][CG][CG]ACTCCCT[CG]G
[CG]GCACCCCCCACCCATCCCCTT[CG]CCCCTCCTC[[CG]]C
TCCCTCTGTGCTCC[CG]AGG[[CG]]CAGTG[CG]CTC[CG]GC
CTTTGACCTTCTCAGGCTC[CG]CTGGGCCC[CG]CAC[CG]CTG
GCC[CG]GTCTGCAGTGAGGTC[CG]CAGCCTGAG[CG]A[[CG]
]C[CG]GCTGGAGGGC[CG]CTTATTGTCCCTGTGACAGGGCCCC
A
SEQ ID NO: 5163
CTAAG[CG]AGCTGCCTCCACCCCCACTGTGT[CG]GG[CG]G[C
G]CAAACTG[CG]GG[CG]CAGGCAGAGGAGC[CG][CG]GCTCT
G[CG]C[CG]GG[CG]GGAGC[CG]AAGCCCAGAGCCT[CG]CCA
GGGCCTCCC[CG]C[CG]AG[CG]CACTTAC[CG]T[CG]CTGAG
GCAGAG[CG][CG]GTCAGCA[CG]AGGACCAGCA[CG]ACCA[C
G]ACCTTGG[CG]TTCATGG[CG][CG]GG[CG]GG[CG]GG[CG
]GG[CG]GG[CG]GA[CG]AG[CG][CG]GGT[CG]GGGGC[CG]
GA[CG]C[CG]AG[CG]GGCAATG[CG]GCTGA[CG]GAGAGTGA
AAGTG[CG]G[CG]GTGGGAGG[CG][CG][CG]C[[CG]]GG[C
G]CTTTAGAGGGGAGAGCCAGG[CG]GGG[CG]GGG[CG]GGG[C
G][CG][CG]GTGAGGGG[CG]GGCC[CG]GAGC[CG]AGTGCTG
GC[CG]TGGC[CG]GGGTCTCTGA[CG][CG][CG]ACTCCCT[C
G]G[CG]GCACCCCCCACCCATCCCCTT[CG]CCCCTCCTC[CG]
CTCCCTCTGTGCTCC[CG]AGG[[CG]]CAGTG[CG]CTC[CG]G
CCTTTGACCTTCTCAGGCTC[CG]CTGGGCCC[CG]CAC[CG]CT
GGCC[CG]GTCTGCAGTGAGGTC[CG]CAGCCTGAG[CG]A[[CG
]]C[CG]GCTGGAGGGC[CG]CTTATTGTCCCTGTGACAGGGCC
SEQ ID NO: 5164
GGCTG[CG]CTGCCCTGAAGTGGTTCTCCAAGCAG[[CG]][[CG
]]GAGGGTGG[[CG]]GA[CG]G[CG]GA[CG]GAGCCCAGGGGC
[CG][CG]T[CG]GGTGGGGAAACC[CG]AACT[CG][CG]GAGG
GGAATCCCTCCCCCTC[CG]CCCCAGCCCCCCAGCAGCACC[CG]
[CG]GTGGGG[CG]GGGG[CG]CTCTGCCAGCCC[CG]GGAACAG
CAGAGG[CG]G[CG]GCACTGGCTGGACCCA[CG][CG][CG][C
G]CCTC[CG]GGGCTGAAGAAGGAAGGAGTGAGC[CG]AGC[CG]
AGCACCCCACATCTGGAGGGGACAGCCAGC[CG]TGGGCCC[CG]
CCC[CG]G[[CG]]TC[CG]GAGCAGGAGAACTC[CG]AGCTTCT
TGCCCAGGCAGAGAGAGCAGGAG[CG]GAC[CG][CG][CG]CC[
[CG]]GGATTGAGAGTCCTTG[CG]CTCCAGACCCCCACCCAGTG
GC[CG]CCAGGGTCCC[CG]CCTGTC[CG]GACCCT[CG]C[CG]
[CG]CCCAGGCAGG[CG][CG]CCAGGG[CG]GGGCTGACCTGCC
[CG][CG]AAGTTG[CG]GACAGTG[CG]TGAGAAACCAGCACCC
CCTTC[CG]C[CG]CCTCCAGCTTATGGTGAGTGTGGCTGGGGGT
GCAGAGAG[[CG]]CA[CG]GGAATT[CG]GGGGTCTGGGGC[CG
]AGAA[CG]TGA
SEQ ID NO: 5165
CACCACAGGAACCTGACT[[CG]]CAGGAGT[CG]TCCTC[[CG]
]TCTCTA[CG][CG]AAG[CG]CCCCCT[CG]AGGTGGGCAGGGG
GTGG[CG]G[CG]G[CG]A[CG]GTGG[CG]GAGC[CG]CAGAG[
CG]AGCTAGAGAG[CG]AGAG[CG]GTGAGACTCTG[CG]GA[CG
]TCTTCC[CG]CC[CG]C[CG][CG]CTC[CG]CCCCACCCAGCC
TC[CG]CAGCCT[CG]GGC[CG]GAT[CG]CC[CG]G[CG]GGGA
AGATG[CG]CCTCAAGAACCAGGTAGAAG[CG]CCT[CG]G[[CG
]]CAGGCCC[CG]CACCCC[CG]ACTCTGCC[CG]CCCTCTGTTA
[CG]GACACC[CG]CTGGGCCA[[CG]]TGGT[CG][CG]ACTGG
CTTCTCCCAG[CG]GCCAGCCTGGCCACCC[CG]ACTCCCAGGGA
GGGGGAGAGGGCCCTTGCAAGAGGATCCTGCCCC[CG][CG]CTG
CCCAGACCTGAGGGCTCCTGG[CG]ACCCCACC[CG]CAGCCCAT
CTGG[CG]GCTCTGGCCC[CG]CAGGTCAGGGTCACACCCCTGC[
CG]GCCTCCTGAGACTTCC[CG]GCCCCAGGGGAGAGAGCTGAAA
CTTGGGTTGA[CG][CG][CG]CCCCCTCCCCAG[CG]ACAGG[C
G]ACCC[CG]CAGCAGCCC[CG][CG]CCACTCCTCTCTG[CG]C
CTTTC[CG]T
SEQ ID NO: 5166
[CG]TA[CG]TA[CG]TTATCACCCA[CG]GATAT[CG][CG]AA
AGACACAGCTTAGCCCAGAGCCTATGCTAAGAACCCTCATCCACC
ATCTGAGGGGCAGGAGG[CG][CG]CAAGGTGTC[CG]AAGGGGC
ATGGGAATTCCTATAAGAAA[CG]GTCCCTTCTGGATAGT[CG]G
AACATAGAGGAAAA[CG]GGGGTGGGTTAGGGGAACACTTACTCT
TGTGGGGCCCTG[CG]CTGG[[CG]]AATGTCAAGCCTCCAGGTT
CACAAATGGCTGGAGGTGCT[CG]GGGTTAGCTCC[CG]AGGG[C
G]GCAAG[CG]C[CG]AC[CG]GTCCT[[CG]]CT[CG]CTAGGC
AGG[CG]CCTC[CG]GATTC[CG]TTCATGCCTCT[CG]GAGCTA
CAGGGCTTGGTG[CG]GAGA[CG]CAGGG[CG]GG[[CG]][CG]
CTGGGCTCTGGGTGTC[[CG]]CAACCCAAAGTGCAGCTGGTGTC
TTGA[CG]CTAC[[CG]]TCTATGCACAAGC[CG]G[CG]G[CG]
G[CG]G[[CG]]GAGCTTGGAGGAGGCAGGGAGATTCCAAATAAA
TCCACTAATTCTGGGCTGAG[CG]CTC[[CG]]G[CG]TG[CG]A
GCC[CG]CCTGCCTGCCAAATGTAACTGTGAAGTGATGTGGAAAA
GTGAGC[CG]GGTGCCTCCCCTGA[CG]GAT
SEQ ID NO: 5167
TCTCCTTCAACATTTTGAGCATACTGGAATGCCAACCCCCTAGGT
AGGTGCCAGGGCCACCACAGGAACCTGACT[CG]CAGGAGT[[CG
]]TCCTC[CG]TCTCTA[CG][CG]AAG[CG]CCCCCT[CG]AGG
TGGGCAGGGGGTGG[CG]G[CG]G[CG]A[CG]GTGG[CG]GAGC
[CG]CAGAG[CG]AGCTAGAGAG[CG]AGAG[[CG]]GTGAGACT
CTG[CG]GA[[CG]]TCTTCC[CG]CC[CG]C[CG][CG]CTC[C
G]CCCCACCCAGCCTC[CG]CAGCCT[CG]GGC[CG]GAT[CG]C
C[CG]G[CG]GGGAAGATG[CG]CCTCAAGAACCAGGTAGAAG[C
G]CCT[CG]G[CG]CAGGCCC[CG]CACCCC[CG]ACTCTGCC[C
G]CCCTCTGTTA[CG]GACACC[CG]CTGGGCCA[[CG]]TGGT[
CG][CG]ACTGGCTTCTCCCAG[CG]GCCAGCCTGGCCACCC[CG
]ACTCCCAGGGAGGGGGAGAGGGCCCTTGCAAGAGGATCCTGCCC
C[CG][CG]CTGCCCAGACCTGAGGGCTCCTGG[CG]ACCCCACC
[CG]CAGCCCATCTGG[CG]GCTCTGGCCC[CG]CAGGTCAGGGT
CACACCCCTGC[CG]GCCTCCTGAGACTTCC[CG]GCCCCAGGGG
AGAGAGCTGAAACTTGGGTTGA[CG][CG][CG]CCCCCTC
SEQ ID NO: 5168
CCCTTTTTT[CG]TAGCTGCTGA[CG][CG]CTGGTGGTGCCTAT
TAATCATTTACCAGTCCAGAGC[CG][CG]CCAGTTAATGGCTGT
GC[CG]TG[CG]GTGCTCCCACATCCTGGCCTCTCCTCTCCA[CG
]GT[CG]CCTGTGCC[CG]GGCACCC[CG]GAGCTGCAAACTGCA
GAGCCCAGGCAAC[CG]CTGGGCTGTG[[CG]]CCC[CG]C[CG]
G[CG]C[CG]GTAGGAGC[CG][CG]CTCCC[CG]CAG[CG]GTT
G[CG]CTCTACC[CG]GAGG[CG]CTGGG[CG]GCTGTGGGCTGC
AGGCAAG[CG]GT[CG]GGTGGGGAGGGAGGG[CG]CAGG[CG]G
[[CG]]GGTG[CG][CG]AGGAGAAAGCCCCAGCCCTGGCAGCCC
CACTGGCCCCCCTCAGCTGGGATGTTCCCCAATGGCAC[CG]CCT
CCTCTCCTTCCTCCTCTCCTAGCCCCAGCC[CG]GGCAGCTG[CG
]G[CG]AAGG[CG]G[CG]GCAGCAGGGGCCC[CG]GGGC[CG]G
[CG]CTG[CG]GA[CG]GCATGGAGGAGCCAGGG[CG]AAATG[C
G]TCCCAGAA[CG]GGACCTTGAG[CG]AGGGCCAGGGCAG[CG]
CCATCCTGATCTCTTTCATCTACTC[CG]TGGTGTGCCTGGTGGG
GCTGTGTGGGAACTCTATGGTCATCTA
SEQ ID NO: 5169
GAGGGAACCC[CG]GAAGGAGCCACTAAAGTTGAGCAGAGTGCAG
GACTGGGAAGGAAAAAAATGGGGGG[CG]GGGGGGACAAGCCACC
TATGTGCTCTCCTCCCTTTCTCCACCCCACCCCCTTTTTT[CG]T
AGCTGCTGA[CG][CG]CTGGTGGTGCCTATTAATCATTTACCAG
TCCAGAGC[CG][CG]CCAGTTAATGGCTGTGC[CG]TG[CG]GT
GCTCCCACATCCTGGCCTCTCCTCTCCA[CG]GT[CG]CCTGTGC
C[CG]GGCACCC[CG]GAGCTGCAAACTGCAGAGCCCAGGCAAC[
CG]CTGGGCTGTG[CG]CCC[CG]C[CG]G[CG]C[CG]GTAGGA
GC[CG][CG]CTCCC[CG]CAG[CG]GTTG[CG]CTCTACC[CG]
GAGG[CG]CTGGG[CG]GCTGTGGGCTGCAGGCAAG[CG]GT[CG
]GGTGGGGAGGGAGGG[CG]CAGG[CG]G[[CG]]GGTG[CG][[
CG]]AGGAGAAAGCCCCAGCCCTGGCAGCCCCACTGGCCCCCCTC
AGCTGGGATGTTCCCCAATGGCAC[CG]CCTCCTCTCCTTCCTCC
TCTCCTAGCCCCAGCC[CG]GGCAGCTG[CG]G[CG]AAGG[CG]
G[CG]GCAGCAGGGGCCC[CG]GGGC[CG]G[CG]CTG[CG]GA[
CG]GCATGGAGGAGCCAGG
SEQ ID NO: 5170
[CG]TCC[CG]CACATCCTCATAGACAA[CG]CCCTGGGGCTCCT
TCTTTTCTCCAGGG[CG]CCACATCTTCCT[CG]GGCTG[CG]CT
TCATTGACCCCACCC[CG]GA[CG]CCATCTGGTGCATCTGCTCC
CCA[CG]AG[CG][CG]GGCACCTGGGG[CG]AGAGAG[CG]CTG
TCAGC[CG]GCCAGG[CG]CTGGGGTC[CG][CG][CG]AGCC[C
G]AGCTCTCCCT[CG]CTGCAGCTCACAGGCAG[CG]AAAATCT[
CG]CTC[CG][CG]AGAGCCCTGGAGAACTTCTGGAAGGAGTTCT
CAGGCC[CG][CG]CTACTTACAGTGCAGGAAGCAAG[[CG]]GG
G[[CG]]TGAAGAGGAGGTAGAAACACAGACCTCCCTAGCAAAGA
GGGAGG[CG]G[CG]CAG[CG]TCTGC[CG]AGGACT[CG]CCCC
TTCAGGAACAAAGTGACTCCCC[CG]TCC[CG]CTGTCCTGCAGC
TGCAGCAG[CG]CACTCCCAGAGTCAAG[CG]TGTCAGGT[CG]G
TGTGGATGCAG[CG]AATTTGTTGTAATCTACACATTAAGAGCCC
CCTTGCCT[CG]CCCTGCCCCCTCCAAC[CG]TGTGTGTGTGTGT
GTGTGTGTGTGTGTGTGTGTGTGTGTGTGTGTGTGTGTAAAGAGA
CAGGA[CG]AGAG
SEQ ID NO: 5171
[CG]CACATCCTCATAGACAA[CG]CCCTGGGGCTCCTTCTTTTC
TCCAGGG[CG]CCACATCTTCCT[CG]GGCTG[CG]CTTCATTGA
CCCCACCC[CG]GA[CG]CCATCTGGTGCATCTGCTCCCCA[CG]
AG[CG][CG]GGCACCTGGGG[CG]AGAGAG[CG]CTGTCAGC[C
G]GCCAGG[CG]CTGGGGTC[CG][CG][CG]AGCC[CG]AGCTC
TCCCT[CG]CTGCAGCTCACAGGCAG[CG]AAAATCT[CG]CTC[
CG][CG]AGAGCCCTGGAGAACTTCTGGAAGGAGTTCTCAGGCC[
CG][CG]CTACTTACAGTGCAGGAAGCAAG[[CG]]GGG[[CG]]
TGAAGAGGAGGTAGAAACACAGACCTCCCTAGCAAAGAGGGAGG[
CG]G[CG]CAG[CG]TCTGC[CG]AGGACT[CG]CCCCTTCAGGA
ACAAAGTGACTCCCC[CG]TCC[CG]CTGTCCTGCAGCTGCAGCA
G[CG]CACTCCCAGAGTCAAG[CG]TGTCAGGT[CG]GTGTGGAT
GCAG[CG]AATTTGTTGTAATCTACACATTAAGAGCCCCCTTGCC
T[CG]CCCTGCCCCCTCCAAC[CG]TGTGTGTGTGTGTGTGTGTG
TGTGTGTGTGTGTGTGTGTGTGTGTGTGTGTAAAGAGACAGGA[C
G]AGAGAATGA
SEQ ID NO: 5172
T[CG]TAGCTGCTGA[CG][CG]CTGGTGGTGCCTATTAATCATT
TACCAGTCCAGAGC[CG][CG]CCAGTTAATGGCTGTGC[CG]TG
[CG]GTGCTCCCACATCCTGGCCTCTCCTCTCCA[CG]GT[CG]C
CTGTGCC[CG]GGCACCC[CG]GAGCTGCAAACTGCAGAGCCCAG
GCAAC[CG]CTGGGCTGTG[CG]CCC[CG]C[CG]G[CG]C[CG]
GTAGGAGC[CG][CG]CTCCC[CG]CAG[CG]GTTG[CG]CTCTA
CC[CG]GAGG[CG]CTGGG[CG]GCTGTGGGCTGCAGGCAAG[CG
]GT[CG]GGTGGGGAGGGAGGG[CG]CAGG[CG]G[[CG]]GGTG
[CG][[CG]]AGGAGAAAGCCCCAGCCCTGGCAGCCCCACTGGCC
CCCCTCAGCTGGGATGTTCCCCAATGGCAC[CG]CCTCCTCTCCT
TCCTCCTCTCCTAGCCCCAGCC[CG]GGCAGCTG[CG]G[CG]AA
GG[CG]G[CG]GCAGCAGGGGCCC[CG]GGGC[CG]G[CG]CTG[
CG]GA[CG]GCATGGAGGAGCCAGGG[CG]AAATG[CG]TCCCAG
AA[CG]GGACCTTGAG[CG]AGGGCCAGGGCAG[CG]CCATCCTG
ATCTCTTTCATCTACTC[CG]TGGTGTGCCTGGTGGGGCTGTGTG
GGAACTCTATGGTCATCTA[CG]TGATCC
SEQ ID NO: 5173
GCAAAACCTTGAGG[CG]TA[CG]TA[CG]TTATCACCCA[CG]G
ATAT[CG][CG]AAAGACACAGCTTAGCCCAGAGCCTATGCTAAG
AACCCTCATCCACCATCTGAGGGGCAGGAGG[CG][CG]CAAGGT
GTC[CG]AAGGGGCATGGGAATTCCTATAAGAAA[CG]GTCCCTT
CTGGATAGT[CG]GAACATAGAGGAAAA[CG]GGGGTGGGTTAGG
GGAACACTTACTCTTGTGGGGCCCTG[CG]CTGG[[CG]]AATGT
CAAGCCTCCAGGTTCACAAATGGCTGGAGGTGCT[CG]GGGTTAG
CTCC[CG]AGGG[CG]GCAAG[[CG]]C[CG]AC[CG]GTCCT[[
CG]]CT[CG]CTAGGCAGG[CG]CCTC[CG]GATTC[CG]TTCAT
GCCTCT[CG]GAGCTACAGGGCTTGGTG[CG]GAGA[CG]CAGGG
[CG]GG[[CG]][CG]CTGGGCTCTGGGTGTC[[CG]]CAACCCA
AAGTGCAGCTGGTGTCTTGA[CG]CTAC[[CG]]TCTATGCACAA
GC[CG]G[CG]G[CG]G[CG]G[CG]GAGCTTGGAGGAGGCAGGG
AGATTCCAAATAAATCCACTAATTCTGGGCTGAG[CG]CTC[[CG
]]G[CG]TG[CG]AGCC[CG]CCTGCCTGCCAAATGTAACTGTGA
AGTGATGTGGAAAAGTGAGC[CG]GGTGC
SEQ ID NO: 5174
ACCTCCCAGC[CG]TCTC[CG]C[CG]CC[CG]AGCATCCTTGAG
GTGGGA[CG]AGCAGGGGCTTGGATCCCTGC[CG]GC[CG]TCTG
GTGTGTGAGGCTTGCA[CG]GCCCCTGGCTGCCC[CG][CG]CCT
[CG]C[CG]GAGCC[CG]AGGGGG[CG]CAGGTC[CG]GGG[CG]
AGGGC[CG]GC[[CG]]GGCTGTTTGATGGCTTCACTGAGAAGAG
TCAAAGTGCTGTTGGTGTTGAACTTGAT[CG][CG]GTAGC[CG]
GCTT[CG]TGCTCTTCCTGGCCAAGTGC[CG]GCCCAT[CG][CG
]GTG[CG]CAG[CG]GAGA[CG]CCTTCCA[CG]AGATC[CG]GC
[CG][CG][CG]C[CG]AGGTGGCCAACCTCAG[CG][CG]CACA
G[CG]CCAGCCCCATCCAGGATG[CG]GTCCTGAAG[CG]CCTGT
[CG]CTGCTGGAGGACAT[CG]TGTAC[CG]GCAGCTGAATGGTA
AGGA[CG]CA[CG]C[CG]G[CG]CCTC[CG]GGGCT[CG]A[CG
][CG]GG[CG]GGC[CG]GGCACAGGGTGAGCCCCAGGGTCCTTG
[CG][CG]CTG[CG]CCCTGTGCCTGGGAGC[CG]GCACACCCTG
GCTCC[CG][CG][CG]CTCCTTCTTACCCTTCCTGCCC[CG]TT
T[CG]GGCAGATGGC[CG]GGGCTGCTGGAAAGAACAACTTGCCT
GATTCT
SEQ ID NO: 5175
[CG]C[CG]CACTCACAC[CG]GGTGCCTGGGAAAAT[CG]CAGA
[CG]C[CG]GGGAGGAGCAGGGGG[CG]GTGATGGGAAGGGGAGC
TG[CG]AGG[CG]AAGTGTTCTTCAGGGAAG[CG]GGCT[CG]AG
TCTC[CG]CAGCTG[CG]G[CG]G[CG]G[CG]G[CG]G[CG][C
G]CTGGGC[CG]G[CG]G[CG]GG[CG][CG]GGCAGGGGGC[CG
]GGGGTGC[CG][CG][CG]GTAGGAGCCTGGCTTGGACAGC[[C
G]]AGGAGCAGGAAGTGGCCTCTGACCCAGGACAC[CG]AGCAGG
GCTCTCTTGCCTGGATT[CG]CCTTTACAAAGTAACT[CG][CG]
AAGGTCCC[CG]GAGGGG[CG]TCAAG[CG]G[CG]ACAG[CG]G
CC[CG]CC[CG]CC[CG]CAGTC[CG]AAGCCCCCAGCCCTGCTG
TCTTGCCTTCCCCCATTCCATCAGTTGCCATTGCAA[CG]CCAAT
CCTGTTACA[CG]ATACAGACT[CG]CAT[CG]C[CG]AA[CG]G
GGAGAGGAGGAAGAGGAGGAGGAGGAAGAGGAGGAGGAGGAAGAG
GAGGAGTGGGGCTAGGGGAA[CG]GGGGTGGGGAAGAGGGAAGGG
AGGAGGGGGAAGAAGGAGGAGGAAAGGGTCCAACAGGGAG[CG]G
AGTGTG[CG]TCTGGAGCT[CG]CTTGGGCA
SEQ ID NO: 5176
ACACACACTCACACACTCTCCCACAACACAATACCCTGACACACA
CTCACA[CG]CA[CG]C[CG]CACTCACAC[CG]GGTGCCTGGGA
AAAT[CG]CAGA[CG]C[CG]GGGAGGAGCAGGGGG[CG]GTGAT
GGGAAGGGGAGCTG[CG]AGG[CG]AAGTGTTCTTCAGGGAAG[C
G]GGCT[CG]AGTCTC[CG]CAGCTG[CG]G[[CG]]G[CG]G[C
G]G[CG]G[CG][CG]CTGGGC[CG]G[CG]G[CG]GG[CG][CG
]GGCAGGGGGC[CG]GGGGTGC[CG][CG][CG]GTAGGAGCCTG
GCTTGGACAGC[[CG]]AGGAGCAGGAAGTGGCCTCTGACCCAGG
ACAC[[CG]]AGCAGGGCTCTCTTGCCTGGATT[[CG]]CCTTTA
CAAAGTAACT[CG][CG]AAGGTCCC[CG]GAGGGG[CG]TCAAG
[CG]G[CG]ACAG[CG]GCC[CG]CC[CG]CC[CG]CAGTC[CG]
AAGCCCCCAGCCCTGCTGTCTTGCCTTCCCCCATTCCATCAGTTG
CCATTGCAA[CG]CCAATCCTGTTACA[CG]ATACAGACT[CG]C
AT[CG]C[CG]AA[CG]GGGAGAGGAGGAAGAGGAGGAGGAGGAA
GAGGAGGAGGAGGAAGAGGAGGAGTGGGGCTAGGGGAA[CG]GGG
GTGGGGAAGAGGGAAGGGAGGAGGGGGAAGAAG
SEQ ID NO: 5177
ACACAATACCCTGACACACACTCACA[CG]CA[CG]C[CG]CACT
CACAC[CG]GGTGCCTGGGAAAAT[CG]CAGA[CG]C[CG]GGGA
GGAGCAGGGGG[CG]GTGATGGGAAGGGGAGCTG[CG]AGG[CG]
AAGTGTTCTTCAGGGAAG[CG]GGCT[CG]AGTCTC[CG]CAGCT
G[CG]G[[CG]]G[CG]G[CG]G[CG]G[CG][CG]CTGGGC[CG
]G[CG]G[CG]GG[CG][CG]GGCAGGGGGC[CG]GGGGTGC[CG
][CG][CG]GTAGGAGCCTGGCTTGGACAGC[[CG]]AGGAGCAG
GAAGTGGCCTCTGACCCAGGACAC[[CG]]AGCAGGGCTCTCTTG
CCTGGATT[[CG]]CCTTTACAAAGTAACT[CG][CG]AAGGTCC
C[[CG]]GAGGGG[CG]TCAAG[CG]G[CG]ACAG[CG]GCC[CG
]CC[CG]CC[CG]CAGTC[CG]AAGCCCCCAGCCCTGCTGTCTTG
CCTTCCCCCATTCCATCAGTTGCCATTGCAA[CG]CCAATCCTGT
TACA[CG]ATACAGACT[CG]CAT[CG]C[CG]AA[CG]GGGAGA
GGAGGAAGAGGAGGAGGAGGAAGAGGAGGAGGAGGAAGAGGAGGA
GTGGGGCTAGGGGAA[CG]GGGGTGGGGAAGAGGGAAGGGAGGAG
GGGGAAGAAGGAGGAGGAAAGGGTCCAACAGGGAG
SEQ ID NO: 5178
GAGACTC[CG]AGA[CG]CCTAACCCTGGGC[CG][CG]AGGT[C
G]CCTGTTACAAAGGGACAACTTTCTACC[CG]CTC[CG][CG]T
TCCCTCC[CG]ATTCTCCAGCTCTGCCTGGCT[CG]GAATCCCAG
AGCCAGGATGGGAACT[CG]GGGTTGCCT[CG]CCTCCTAGATCT
C[CG]G[CG]AGAGGTC[CG]AGGGGGTGG[CG]GAGAGCTGCAG
GAG[CG]ATGGAGGAGTGGGCAGATTGCTCAAGGGATGGGGGTGC
CCAAAAGCAACAGCCTGCCAAAAACTAAGAGGGA[CG]GGGAGGG
GGGACCTTTGCAGACTTTCTT[CG]TTTTCTTAGATTTCAAACTT
GCAAGGAT[CG]CAAGGATCCAGGGCCCCAGGAAAGGAGGGGTGT
GAAGGACTCAAAATTCCAGCAGCTTGGCTGGGGTGGCTG[CG]CC
AGA[CG]GGCCCTTCCCCAAAGTGCAAACCCACCCCTGTCCT[CG
]GCCC[CG]G[CG][CG]CTCCCTCCCTCAGCC[CG]GGGC[CG]
TACACCACCTGCCCTCTAC[CG]AGAGATCTGGG[CG]G[CG]G[
CG]GC[CG]AAAGCAG[CG]A[CG][CG]CC[CG]GAGCATCCCT
TG[CG]ATA[CG]CTAGGGGA[CG]GTGCTTTCTCTGTCCCAGTT
G[[CG]]TG
SEQ ID NO: 5179
CC[CG]CACTCCACACACTCATGCACACACACACTCACACACACT
CACACACTCTCCCACAACACAATACCCTGACACACACTCACA[CG
]CA[CG]C[CG]CACTCACAC[CG]GGTGCCTGGGAAAAT[CG]C
AGA[CG]C[CG]GGGAGGAGCAGGGGG[CG]GTGATGGGAAGGGG
AGCTG[CG]AGG[CG]AAGTGTTCTTCAGGGAAG[CG]GGCT[CG
]AGTCTC[[CG]]CAGCTG[CG]G[CG]G[CG]G[CG]G[CG]G[
CG][CG]CTGGGC[CG]G[CG]G[CG]GG[CG][CG]GGCAGGGG
GC[CG]GGGGTGC[CG][CG][CG]GTAGGAGCCTGGCTTGGACA
GC[[CG]]AGGAGCAGGAAGTGGCCTCTGACCCAGGACAC[[CG]
]AGCAGGGCTCTCTTGCCTGGATT[CG]CCTTTACAAAGTAACT[
CG][CG]AAGGTCCC[[CG]]GAGGGG[CG]TCAAG[CG]G[CG]
ACAG[CG]GCC[CG]CC[CG]CC[CG]CAGTC[CG]AAGCCCCCA
GCCCTGCTGTCTTGCCTTCCCCCATTCCATCAGTTGCCATTGCAA
[CG]CCAATCCTGTTACA[CG]ATACAGACT[CG]CAT[CG]C[C
G]AA[CG]GGGAGAGGAGGAAGAGGAGGAGGAGGAAGAGGAGGAG
GAGGAAGAGGAGGAGTGGGGCTAGGGGAA[CG]GG
SEQ ID NO: 5180
CCCTTGG[CG]G[CG]GGGG[CG][CG][CG]GGGTGG[CG]GGG
GAGGC[CG]AGG[CG]C[CG]GCAGCTT[CG][CG]C[CG]G[CG
]GCTGGAAG[CG]GG[CG]GGCTGCA[CG]GG[CG]GCT[CG]AG
TG[CG]GGGACCCCAGCCCCT[CG]CCCT[CG]TGAG[CG]C[CG
]CCCCTGCCACCTGCTGCCAAGTCAC[CG]GACTGGGGATG[CG]
GGGGG[CG]GGGTG[CG]GGGAGAGGAAAG[CG]C[CG][CG]GG
TGGCA[CG]GTGCCTCTGG[CG]ACAGAGTAGATGGACC[CG]AA
AGAGACC[[CG]]AGGTGACTT[CG]GGCTGGGCAGGACACCCC[
CG]GGAGTTGCCAG[CG]GCTCTCAG[CG]GG[CG]CCTCTAGGA
CCCCTTGTCACTG[CG]AGCAG[CG]CCTGCTCTGGGGAGGGGCT
[CG]AAGG[CG]C[CG][CG]CCTTCTCAA[CG][CG]C[CG]CT
G[[CG]]TCCCCCAGGGGCTCCAACTTGGACAGCTAGACTGGAAA
TACTGCTGCACAAAGTTAGGCTGAGTT[CG]AAGGACACCAGAGA
GGAAG[CG]CAAGGAGATGCCCTTCTC[CG]GAGC[CG]GGCAGA
G[CG]CCAGAACTCCTAGA[CG]GGAAACTTTCCCCCATTGAAGC
TAGAAC[CG]GTCATG[CG]ACT[CG]GCTAAGTGTGGGGAAACA
SEQ ID NO: 5181
GGCCTCAGTTTCCCTTTCTGTAAAATGCAGGTGAAGAGGCATGAG
CTCAGGATTCCTAAAGCCCTA[CG]GGGCTGAGCAAGGA[CG]GT
GCTTTG[CG]TTTGCCTCCCTTCCCCCAGCC[CG]CC[CG]AGAG
GGTTTGCTGGGGCAGGGTGGCCCCTGGGA[CG]GGTTCCAGACAG
TTCTAGG[[CG]]CTCAGGTC[CG]CAGCTGTGCTACCCC[CG]C
[CG]CC[CG]GGA[CG]CC[CG]GTCCC[CG]CCAGGGCCCTCTC
ACTGTAGCTTTAAGGAGGGCTGGGGC[CG]GGTGCAG[CG]GCAC
CTGGAGTCT[CG]GTGGAACC[[CG]]GCAG[CG]GTGGG[CG][
CG]GACCC[CG]GAGAGGCTGCCC[CG]AGCC[CG]AGCACCCCC
TGAC[CG]GG[CG]CTCACCA[CG]GGTGTTGGGACAAGCAG[CG
]GAGCCTG[CG]GGCTGGAGCCAGGCT[[CG]]GACCCTC[CG][
CG]C[CG]GGG[CG]GG[CG]GC[CG]AG[CG]GA[CG]CAGCTG
GCAGTGG[CG]G[CG]GGAGAG[CG]CCC[CG]GATC[CG]CC[C
G]GAGCCCAACCC[CG]TGGCACTT[CG]GCTGGCTGGGCAG[CG
]G[CG]CTGGGGACAA[CG][CG]GGGCCTTCTGCAA[CG]AG[C
G]CCTG[CG]TGGGACTCCAGGGGC[CG]G[CG]CCC[CG]CT
SEQ ID NO: 5182
AAGGAG[CG]TGAGGAGTGTG[CG]GAGCTTGGCACACCAAGTTG
CTGAGACTGTGACACCAGCCTC[CG]CC[CG]TTC[CG][CG][C
G]GGTGCAGG[CG]G[CG]AGCCT[CG]GCT[CG]GACACCACAG
CTCTCCTGCC[CG][CG]C[CG]GGCAGTCCTCTGCCTGTCCAGA
GGCAGCACTCC[CG]GCTCT[CG]GCTGGCTGTGGGTCTGTCTTG
TGGGGCTCCAGCACTAGCCTGCT[CG]GCCT[CG]GAAACTCCTG
CAG[CG]TCCAGAACACAGAAAATAGACTCATCTCCTAATT[CG]
CCAGGGAGCT[CG]AGGGCTG[CG]GGGC[[CG]][CG]GGGCTG
CCTCCCC[CG]CTCCTCCCCCAACC[CG]ACCCCACCCCACCCC[
CG]CCAGGGCTT[CG]G[CG]GCCTCC[CG]GAGTCACACAGCCT
ACCCCCCCACCCCAACACCCCCTCCCC[CG]GCAGACAAAGGGCC
TGGGCAAATT[CG]C[CG]CC[CG]GCCTCCTAG[CG]CTC[CG]
GGGAGGC[CG]CTG[CG]CCC[CG]GAGTGGAT[CG][CG]CTGG
AGG[CG]TG[CG]C[CG]GG[CG]AGAAGC[CG][CG]GC[CG][
CG]GGAG[CG]CAGTATGGGGAAGAAC[[CG]][[CG]]AGATG[
CG]CCTGACTCACATCTGCTGCTGCTGCCTCCTTTAC
SEQ ID NO: 5183
GACAGAGGAG[CG]A[CG][CG]CTCT[CG]CCTGGATTCTTTTC
CTTTTCTGCCCAGG[CG]AGACCCACTTATTTCCTGGGGT[CG][
CG]TTGGAGAGGGCTTTCA[CG]CC[CG]GGGTG[CG]GAAAAGA
AGCCAAATCCACCTTCCTCCACTGTTGGCCACCCTCCTGCAGGCT
CCCCCAG[CG]C[CG]ACTTCATTTTCTCTCTTCTCT[CG]CTAC
TTCCTCTCTGCCTTTCTTT[CG]TTATTTTTCCAC[CG]AGT[CG
]CCAC[CG]C[CG]CTTGCTTCCT[CG]GAGGAGCAA[CG][CG]
ACTGGCCAGCAAAGGGTGGCTCTGCTC[CG]AG[[CG]]CCAAAG
TTCTCCC[CG]CCTCAGC[CG]G[CG]CCTCCCTGTTGCTGAGCC
CTGG[CG]CCTGCCTGT[CG]CTTGGCTG[CG]CTAAA[CG]CCC
ACTGTTGGTGAGATTCC[CG]AGTGGCACATCC[CG][CG]CCCC
TGGAAAGTCCTCTCCCCTCAAAGGCTGGG[CG]TCATAGTTTGCA
AAATTCCCTAAAACCTAAGAAGGAAAATAGGACTATGAGC[CG]G
TGAGAATTCTGAATTCAGAGT[CG]CACCTGAGGGATCTGAAATT
[CG]GTGGTTCACTGAAATAGGTTCAAAGAGGCTGTGACTTAA[[
CG]]A
SEQ ID NO: 5184
GGGTGAGAGCCTTCAG[CG]GTG[CG]TCCTAAGGAG[CG]TGAG
GAGTGTG[CG]GAGCTTGGCACACCAAGTTGCTGAGACTGTGACA
CCAGCCTC[[CG]]CC[CG]TTC[CG][CG][CG]GGTGCAGG[C
G]G[CG]AGCCT[CG]GCT[CG]GACACCACAGCTCTCCTGCC[C
G][CG]C[CG]GGCAGTCCTCTGCCTGTCCAGAGGCAGCACTCC[
CG]GCTCT[CG]GCTGGCTGTGGGTCTGTCTTGTGGGGCTCCAGC
ACTAGCCTGCT[CG]GCCT[CG]GAAACTCCTGCAG[CG]TCCAG
AACACAGAAAATAGACTCATCTCCTAATT[CG]CCAGGGAGCT[C
G]AGGGCTG[CG]GGGC[[CG]][CG]GGGCTGCCTCCCC[CG]C
TCCTCCCCCAACC[CG]ACCCCACCCCACCCC[CG]CCAGGGCTT
[CG]G[CG]GCCTCC[CG]GAGTCACACAGCCTACCCCCCCACCC
CAACACCCCCTCCCC[CG]GCAGACAAAGGGCCTGGGCAAATT[C
G]C[CG]CC[CG]GCCTCCTAG[CG]CTC[CG]GGGAGGC[CG]C
TG[CG]CCC[CG]GAGTGGAT[CG][CG]CTGGAGG[CG]TG[CG
]C[CG]GG[CG]AGAAGC[CG][CG]GC[CG][CG]GGAG[[CG]
]CAGTATGGGGAAGAAC[[CG]][[CG]]AGATG[CG]CCTGACT
SEQ ID NO: 5185
GTG[CG]GGGACCCCAGCCCCT[CG]CCCT[CG]TGAG[CG]C[C
G]CCCCTGCCACCTGCTGCCAAGTCAC[CG]GACTGGGGATG[CG
]GGGGG[CG]GGGTG[CG]GGGAGAGGAAAG[CG]C[CG][CG]G
GTGGCA[CG]GTGCCTCTGG[CG]ACAGAGTAGATGGACC[CG]A
AAGAGACC[[CG]]AGGTGACTT[CG]GGCTGGGCAGGACACCCC
[CG]GGAGTTGCCAG[CG]GCTCTCAG[CG]GG[CG]CCTCTAGG
ACCCCTTGTCACTG[CG]AGCAG[CG]CCTGCTCTGGGGAGGGGC
T[CG]AAGG[CG]C[CG][CG]CCTTCTCAA[CG][CG]C[CG]C
TG[CG]TCCCCCAGGGGCTCCAACTTGGACAGCTAGACTGGAAAT
ACTGCTGCACAAAGTTAGGCTGAGTT[CG]AAGGACACCAGAGAG
GAAG[[CG]]CAAGGAGATGCCCTTCTC[CG]GAGC[CG]GGCAG
AG[CG]CCAGAACTCCTAGA[CG]GGAAACTTTCCCCCATTGAAG
CTAGAAC[CG]GTCATG[CG]ACT[CG]GCTAAGTGTGGGGAAAC
ACTGGCTCTAGACTCCAGGTGAACAT[CG]CAGGGC[CG]AGGTG
CAGAATACCACCTTGGAGAGAGGGGGTGGCATAGACTGGTGGCAT
TTTGGAGAAGCAT
SEQ ID NO: 5186
[CG]CC[CG]AGAGGGTTTGCTGGGGCAGGGTGGCCCCTGGGA[C
G]GGTTCCAGACAGTTCTAGG[[CG]]CTCAGGTC[CG]CAGCTG
TGCTACCCC[CG]C[CG]CC[CG]GGA[CG]CC[CG]GTCCC[CG
]CCAGGGCCCTCTCACTGTAGCTTTAAGGAGGGCTGGGGC[CG]G
GTGCAG[CG]GCACCTGGAGTCT[CG]GTGGAACC[CG]GCAG[C
G]GTGGG[CG][CG]GACCC[CG]GAGAGGCTGCCC[CG]AGCC[
CG]AGCACCCCCTGAC[CG]GG[CG]CTCACCA[CG]GGTGTTGG
GACAAGCAG[CG]GAGCCTG[CG]GGCTGGAGCCAGGCT[CG]GA
CCCTC[CG][CG]C[CG]GGG[CG]GG[CG]GC[CG]AG[CG]GA
[CG]CAGCTGGCAGTGG[CG]G[CG]GGAGAG[CG]CCC[CG]GA
TC[CG]CC[CG]GAGCCCAACCC[CG]TGGCACTT[CG]GCTGGC
TGGGCAG[CG]G[CG]CTGGGGACAA[CG][CG]GGGCCTTCTGC
AA[CG]AG[CG]CCTG[CG]TGGGACTCCAGGGGC[CG]G[CG]C
CC[CG]CTC[CG]CTCCCCCCAGGCCTCAACCC[CG]CTGGCTAC
C[CG][CG]CTGAAACCTCACCTGC[CG]C[CG]GCTGCAAA[CG
]GACTG[CG]CTCCAGGTGGGTGGAAA[CG]TCCTTCTCCTACTT
TCTGGG
SEQ ID NO: 5187
TTGAACC[CG]GGAGG[CG]GAGGTTGTAGTGAGC[CG]AGATCA
[CG]CCATTACACTCCAGCCTGGG[CG]ACAGAG[CG]AGACTC[
CG]TCTCAAAAAAAAAAAAAAAAAAAAAAAAAAGACTTTCCCCTC
TTTGGGCCTCAGTTTCCCTTTCTGTAAAATGCAGGTGAAGAGGCA
TGAGCTCAGGATTCCTAAAGCCCTA[CG]GGGCTGAGCAAGGA[C
G]GTGCTTTG[CG]TTTGCCTCCCTTCCCCCAGCC[CG]CC[CG]
AGAGGGTTTGCTGGGGCAGGGTGGCCCCTGGGA[CG]GGTTCCAG
ACAGTTCTAGG[[CG]]CTCAGGTC[CG]CAGCTGTGCTACCCC[
CG]C[CG]CC[CG]GGA[CG]CC[CG]GTCCC[CG]CCAGGGCCC
TCTCACTGTAGCTTTAAGGAGGGCTGGGGC[CG]GGTGCAG[CG]
GCACCTGGAGTCT[CG]GTGGAACC[[CG]]GCAG[CG]GTGGG[
CG][CG]GACCC[CG]GAGAGGCTGCCC[CG]AGCC[CG]AGCAC
CCCCTGAC[CG]GG[CG]CTCACCA[CG]GGTGTTGGGACAAGCA
G[CG]GAGCCTG[CG]GGCTGGAGCCAGGCT[[CG]]GACCCTC[
CG][CG]C[CG]GGG[CG]GG[CG]GC[CG]AG[CG]GA[CG]CA
GCTGGCAGTGG[CG]G[CG]GGAGA
SEQ ID NO: 5188
AGTTCTTCTTTGGAT[CG]CCCTTCTCTATTTGCACACTAACATA
GCCAACCTTCCCCAGAGCTGGCCCTC[CG]CCCCCAGCTCCTTGG
CCTGGGTCACACCAGGGTCC[CG]GT[CG]GATTTAGC[CG]GGC
TGCTC[[CG]]GGT[CG]GGTGAGGCACTGGGTG[CG]TGTGGGA
GTCTTCTCTTCTGTCTCTT[CG]AAAGACTAGGGAAATGAACAC[
CG]TTCTGGGCTTGACTTTGTCCCTGCTGGGAATATCCCAGTTCC
TGGCTTTGGAAATCTCAGGCAAATAATTGATTCTTAATGCACACT
TAGGAGA[CG]T[CG]GTAGTA[CG]CT[CG]AGAGCCTCTCTGT
CCCAGAGTGGCTGAGAGCA[CG][CG]CCAGACACAGGTTGGCT[
CG]GCC[CG]AAG[CG]AATTTGGGACTCT[CG]T[CG][CG]GT
GTCCTATTAATTAGCTTTTCC[CG]G[CG]CCTCAGGGACTC[CG
]GGGTGAAGATGGAGAGGTGGCATAATGG[CG]GGACTTGAAGT[
CG]TTGTGGCAGGGACCTGGCAG[CG]TTGTTTTCT[[CG]]GGT
TTTGAAC[CG]GTGTGGAGAAGTAACTTCAGCTGCTGAGTTGGGG
C[CG]CCCTGGCTG[CG][CG]GTGG[CG]GAGGAGGAGAGG
SEQ ID NO: 5189
GAGGAG[CG]A[CG][CG]CTCT[CG]CCTGGATTCTTTTCCTTT
TCTGCCCAGG[CG]AGACCCACTTATTTCCTGGGGT[[CG]][CG
]TTGGAGAGGGCTTTCA[CG]CC[CG]GGGTG[CG]GAAAAGAAG
CCAAATCCACCTTCCTCCACTGTTGGCCACCCTCCTGCAGGCTCC
CCCAG[CG]C[CG]ACTTCATTTTCTCTCTTCTCT[CG]CTACTT
CCTCTCTGCCTTTCTTT[CG]TTATTTTTCCAC[CG]AGT[CG]C
CAC[CG]C[CG]CTTGCTTCCT[CG]GAGGAGCAA[CG][CG]AC
TGGCCAGCAAAGGGTGGCTCTGCTC[CG]AG[CG]CCAAAGTTCT
CCC[CG]CCTCAGC[CG]G[CG]CCTCCCTGTTGCTGAGCCCTGG
[CG]CCTGCCTGT[CG]CTTGGCTG[[CG]]CTAAA[[CG]]CCC
ACTGTTGGTGAGATTCC[CG]AGTGGCACATCC[CG][CG]CCCC
TGGAAAGTCCTCTCCCCTCAAAGGCTGGG[CG]TCATAGTTTGCA
AAATTCCCTAAAACCTAAGAAGGAAAATAGGACTATGAGC[CG]G
TGAGAATTCTGAATTCAGAGT[CG]CACCTGAGGGATCTGAAATT
[CG]GTGGTTCACTGAAATAGGTTCAAAGAGGCTGTGACTTAA[[
CG]]AGCTT
SEQ ID NO: 5190
[CG]GCTCTGCC[CG][CG]GCTGAGCCC[CG]CACAC[CG][CG
]C[CG]CTGTCCTTGGGGTCC[CG]GCACA[CG]G[CG]TTCCCT
CCC[CG]CCCC[CG]CCATCCACTCCCAC[CG]CCTCTCCAGTCC
CTGTGC[CG]TCTCCAC[CG]CCCTCTGACTCC[CG]CAC[CG]A
GCTG[CG]TCTC[CG]C[CG]C[CG]GCCTCTCTCAG[CG][CG]
GCC[CG]GCCTCCTCTTTGTCTTTGAAGCTCCCC[CG]C[CG]AG
GCC[CG][CG][CG][CG]GCTCCCCTCTC[CG]TCCCTCTC[CG
]GCCCTTGGG[CG]CCCAGT[CG]GAGGT[CG]GGG[CG]GGATG
GGGCA[CG]AGTCT[CG]GGG[CG]GCC[CG][CG]CTCCCCCTA
CTAGTCCCCTCATTGCCT[CG]GCCC[CG]TCCC[CG]CAGCCT[
CG]GGG[CG]GGAGGG[CG]CAGGGGTCCC[CG]GG[CG]CCCTG
GGAGCCCATCTCCCTCAGGTC[CG][CG]C[CG]GTGTCAGC[CG
]C[CG]G[CG]GGGGG[CG]GGTGGAGATTAAGATGAGTGCTG[C
G]AGGGA[CG]GGGC[CG]AGGGTTTTGTGTAGAAGGAGAGCAGG
ATTAGTGGAGAGAAAGTGCTGACC[CG]GGGTCAGC[CG]CAAGT
CAAACCCTTTTACACTCAGC[CG]G[CG]GAA[CG]AGCA[CG]G
CT[CG]GGC[CG]G
SEQ ID NO: 5191
[CG][CG][CG]GGGGG[CG]GAGAGGA[CG]TAG[CG]CT[CG]
GCC[CG]G[[CG]]CC[CG]CCCCCTAGTGCTGCCCCCACTTTGA
GAGTAATTGAGACTTGAG[CG]TGACTG[CG]GAGCCTGGAGGAT
G[CG]GGCTCCC[CG]AG[CG]GGCTTCCCCTCTGCC[CG]G[CG
][CG]ATGGAG[CG]GGT[CG]GTGAG[CG]GAACAAAGG[CG]C
CTGCC[CG]GGGGAG[CG]GGTCTTC[CG]CTGAAGAG[CG][CG
]GGTGG[CG][CG]C[CG][CG]A[CG]GC[CG]CCTG[CG]GGC
CAAGGTGGGAGGCTGTG[CG]GCCCCAGG[CG][CG]G[CG][CG
]CTC[CG]C[CG]TGGG[CG]GG[[CG]]G[CG]ATCCCTGAGTC
[CG]GCACCTGTG[CG]C[CG]CTCCCTCTGTGCCTCC[CG]GGC
AGCCC[CG]CCTGC[CG]GCCT[CG]GAGTC[CG][CG]G[CG]C
[CG]G[CG]GCTAGAGGTCCAGAGG[[CG]]AACCACTTGCTGGT
GCAGAAGAGAAACCCTCAAATCCCTGGCCTTT[CG][CG]GAGA[
CG]CCTGGA[CG]GGGC[CG]TG[CG]C[CG]TGGACTGAGCAGG
[CG]TCT[CG]GGGAGCACTTCTGCAGAG[CG]AGGACTTCCATG
TGAG[CG]ATTC[[CG]]TTCTCCCCACCACCAATC[CG]ACCTC
CCAGC[CG]TCTC[CG]C[CG]CC[CG]AGCATCCT
SEQ ID NO: 5192
CTC[CG][CG][CG]GGGGG[CG]GAGAGGA[CG]TAG[CG]CT[
CG]GCC[CG]G[CG]CC[CG]CCCCCTAGTGCTGCCCCCACTTTG
AGAGTAATTGAGACTTGAG[CG]TGACTG[CG]GAGCCTGGAGGA
TG[CG]GGCTCCC[CG]AG[CG]GGCTTCCCCTCTGCC[CG]G[C
G][CG]ATGGAG[CG]GGT[CG]GTGAG[CG]GAACAAAGG[CG]
CCTGCC[CG]GGGGAG[CG]GGTCTTC[CG]CTGAAGAG[CG][C
G]GGTGG[CG][CG]C[CG][CG]A[CG]GC[CG]CCTG[CG]GG
CCAAGGTGGGAGGCTGTG[CG]GCCCCAGG[CG][CG]G[CG][C
G]CTC[CG]C[CG]TGGG[CG]GG[[CG]]G[[CG]]ATCCCTGA
GTC[CG]GCACCTGTG[CG]C[CG]CTCCCTCTGTGCCTCC[CG]
GGCAGCCC[CG]CCTGC[CG]GCCT[CG]GAGTC[CG][CG]G[C
G]C[CG]G[CG]GCTAGAGGTCCAGAGG[[CG]]AACCACTTGCT
GGTGCAGAAGAGAAACCCTCAAATCCCTGGCCTTT[CG][CG]GA
GA[CG]CCTGGA[CG]GGGC[CG]TG[CG]C[CG]TGGACTGAGC
AGG[CG]TCT[CG]GGGAGCACTTCTGCAGAG[CG]AGGACTTCC
ATGTGAG[CG]ATTC[[CG]]TTCTCCCCACCACCAATC[CG]AC
CTCCCAGC[CG]TCTC[CG][CG]CC[CG]AGCAT
SEQ ID NO: 5193
GGTGGCTTTGTC[CG]GGTCC[CG]CTCC[CG]AGTCCCAGGCTC
CTGCTGCCCTCCATCTCTTAGCACTCCC[CG]GGGGCTC[CG]AC
T[CG][CG]CCCTCTCCC[CG]TTCTGCCTTCTCCTGATC[CG]C
TC[CG]CTC[CG]TCTCCTC[CG]GC[CG]GAG[CG]TGCAGCAA
C[CG]CCATGGATGCCCCAGTGCCC[CG]AGCC[CG]CTCCAGGG
ATAG[CG]CT[CG]GTCCC[CG]GGGGCCACTGAGAACAGGGGA[
CG]CACTA[CG]AGGGGCAGGGG[CG]TGGCAGGAGCCCTGCCTG
GC[CG]CCCCTGGTGGGAAAAGCCCCTAGGGGT[[CG]]AGGC[C
G]AG[CG]TGGAG[CG]GAGCTGGGGTG[CG]G[CG]AGGGGCAG
CAGGAGC[CG]C[CG]C[CG]CAGA[CG]CC[CG]GGG[CG]CAG
AGGATCAAGAGCCC[CG][CG]C[CG]G[CG]AGGAG[CG][CG]
CTCAGC[CG]GGCTTGGGAGC[CG]C[CG]C[CG]G[CG]CCAAC
TTTTCCCAT[CG][CG]GGAG[CG]AAGAGCAG[CG]GAGAGAGG
GGTCCCAGAA[CG]AAGGTGG[CG]GCA[CG]AGCTCTG[CG]CT
GG[CG]GCTGTGGGGGGC[[CG]]G[CG]CTCAGGACCCCAACTC
CATCCAAGTTG[[CG]][[CG]][CG]GTGGGGG[CG]GG[CG]G
AGG[CG]G[CG]C[CG]GG
SEQ ID NO: 5194
GGAG[CG]CA[CG]GAGATGCCTAGGGAGGAGGTGA[CG]G[CG]
C[CG]TC[CG]C[CG]A[CG]GGCTGGAGT[CG]CACACCACCAG
GCACTTGCCCTCCAGCA[CG]ATGGGCTC[CG]TGT[CG]TTCTG
[CG]CC[CG]CA[CG]GGGCAGCAGG[CG]GGCAGTAGCAGCAAC
AGCAGGGCCAG[CG]CCACCCCCAGGCAGGATC[CG]CAGC[CG]
CC[CG]GCT[CG][CG]CAG[CG]CCCCC[CG]G[CG]CC[CG]G
GCATCATCAGC[CG]CAGCC[CG]AGTGGCCCC[CG]GC[CG]GG
[CG]CCTGCAT[CG]GGACTGGTGGGAGG[CG]G[CG][CG][CG
]GGGGTGGAGGC[[CG]]G[CG]C[CG]G[CG][CG]AG[CG]G[
CG][CG]GAAGGG[CG][CG]AAGGAA[CG][CG][CG]GAGCT[
CG]CAGCAGCCTC[CG]GGGGCCTT[CG]TCCC[CG]GCTCTGA[
CG]TTCAAGGCCAGGGT[CG]TTCTCAGAAGAAAGG[[CG]]CCT
GTGAACCTGTCAGGGCACAGAACCCAAAGCCTTACAC[CG]GGAG
GTGGAGCCAC[CG]GGAAGAAGGGGGACTGGGAGCAGGTGCCTG[
CG]GCT[CG]GGGGTTCTCCC[CG]AAGGCCACCCCCTTGGTCC[
CG][CG]CACAGCCAACC[CG]CTTTC[CG]ATCTGGCACAACAG
GTC[CG]GAGAAA[CG]C
SEQ ID NO: 5195
A[CG]CC[CG]G[CG]GCCC[CG]GCTT[CG][CG]GCCAC[CG]
G[CG]TTGTCTCCACTCT[CG]C[CG][CG]GGCAGTGGCCAGCC
AGTGGC[CG]GAGGAGCTGG[CG]T[CG]G[CG][CG]GAGAGC[
CG]C[CG]TGCTGGGG[CG]C[CG]GGC[CG]GACCAGAGCTGCT
GCCCCAGCAGGG[CG]G[CG]GCAGAGG[CG]GTGAGATGCAGGT
GGAAGC[CG]GAGGGACATCAC[CG]GCAGG[CG]AG[CG]G[CG
]GGGC[CG]GGGCATCCCAGCTCCTGCCAAGCTTGG[CG]G[CG]
[CG]AGGAGGAGT[[CG]]C[CG]GG[CG]CAGCCCCCAATCACC
CAGGAA[CG][CG]GGGA[[CG]]CCTGGGCCACTGCTC[CG]GC
[CG]ATGGTTCCAGAGGAAGC[CG]TCCCCTTGCTAAGGGTTCC[
CG]GGAGGAGGTGAAGG[CG]C[CG][CG]GGCTGGGGGGT[CG]
G[CG]GCTGAAGACCTC[CG]GCTGCCCAGCACCTCCTT[CG][C
G]CTGAC[CG]GGGACT[CG]GCCCACAACCAAGCCATGGTGCAC
TGGT[CG]GGACACAACAGCAG[CG]TGAGTACCCACC[CG]G[C
G]G[CG]GGTC[CG]CCTGTTTCCTGACAC[CG]AAGGGGAATGG
GGGGGTGGGTGGGAG[CG]AGGGACAGATAGTTGCT[CG]GGGGT
[CG]AGG[CG]G
SEQ ID NO: 5196
GATCTGGATCTCAGCCACCTC[CG]GGGGGACC[CG]GCCCCTGC
CC[[CG]]CACTCCA[CG][CG]AAGGGATGCCAGACCCT[CG]G
CCTCCTGGA[CG]CACAG[CG]GGGGCT[CG]CACCCCAACCC[C
G]GGAACACCCTGGCCCCTTTCCCTAA[CG]CTGCCCACTGAGG[
CG]TCCTCAC[CG]TCTACCCTGTTGGGGT[CG]CTCTCTGACCC
C[CG][CG]CTGCATCCC[CG]GGAC[CG]ACCCACCTGCTG[CG
]CAGCTACCCCAGGC[CG]GTCCCAGC[CG]CC[CG]GAGCCCCA
GTG[CG][CG]ATGG[CG]GC[CG]GCAAACTG[CG]CCTG[CG]
CACTGGGCCTCAC[CG][CG]GACTA[CG]ACTCCCACAATGC[C
G][CG]AGGCTGTGC[CG][CG]CAC[CG]GGG[CG]AGCAAGGG
AGC[CG]TGACAGGTGACAGTG[CG]CATGGCCAATCAGA[CG][
CG]AGTGTGGCCTCC[CG]G[CG]TCC[CG]CCCACTC[CG]G[C
G]CCTG[CG]TCATTTTGGGCACCATGGCAA[CG]AAGTAAACAA
G[CG]GGTAAATAATAGACCCCTGACAGCCAGAGACC[CG]GAGA
AACAAAGA[CG]GTGAGAAA[CG]GAGAAACAAAGACAAAAAGA[
CG][CG]CAGAC[CG]GGAGGGAGAGAAGCATGAAGG
SEQ ID NO: 5197
CTGGC[CG]CCCCTGGTGGGAAAAGCCCCTAGGGGT[[CG]]AGG
C[CG]AG[CG]TGGAG[CG]GAGCTGGGGTG[CG]G[CG]AGGGG
CAGCAGGAGC[CG]C[CG]C[CG]CAGA[CG]CC[CG]GGG[CG]
CAGAGGATCAAGAGCCC[CG][CG]C[CG]G[CG]AGGAG[CG][
CG]CTCAGC[CG]GGCTTGGGAGC[CG]C[CG][CG]G[CG]CCA
ACTTTTCCCAT[CG][CG]GGAG[CG]AAGAGCAG[CG]GAGAGA
GGGGTCCCAGAA[CG]AAGGTGG[CG]GCA[CG]AGCTCTG[CG]
CTGG[CG]GCTGTGGGGGGC[[CG]]G[CG]CTCAGGACCCCAAC
TCCATCCAAGTTG[[CG]]C[CG][CG]GTGGGGG[CG]GG[CG]
GAGG[CG]G[CG]C[CG]GGCAGGTGG[CG]GC[CG]CTTGCC[C
G]GGCTGGGCTTGTGC[CG]AG[CG][CG]GGTC[CG]GA[CG]G
AG[CG]AGC[CG]C[CG]C[CG][CG][CG]GGGGTGGAGCTGAG
CTGAAGTCACTGG[CG]GAG[CG]GG[CG][CG]GG[CG]CTGG[
[CG]]GG[[CG]]A[CG][CG]GGAGGGAGGGCAGG[CG]CTGC[
CG]GGACTC[CG]GG[CG]C[CG][CG]TCC[CG][CG]GC[CG]
AGCTG[CG]CTG[CG]CAC[CG]GGTCTC[CG]GG[CG]CTGGAG
G[CG]C[CG]C[CG]G[CG]ACCTCCCCT[CG]GCCT[CG]CAGG
[CG]CTGC[CG]C[CG]CCTCT
SEQ ID NO: 5198
TGCAGGGCCCCTCAC[CG]ATCTGGATCTCAGCCACCTC[CG]GG
GGGACC[CG]GCCCCTGCCC[[CG]]CACTCCA[CG][CG]AAGG
GATGCCAGACCCT[CG]GCCTCCTGGA[CG]CACAG[CG]GGGGC
T[CG]CACCCCAACCC[CG]GGAACACCCTGGCCCCTTTCCCTAA
[CG]CTGCCCACTGAGG[CG]TCCTCAC[CG]TCTACCCTGTTGG
GGT[CG]CTCTCTGACCCC[CG][CG]CTGCATCCC[CG]GGAC[
CG]ACCCACCTGCTG[CG]CAGCTACCCCAGGC[CG]GTCCCAGC
[CG]CC[CG]GAGCCCCAGTG[CG][CG]ATGG[CG]GC[[CG]]
GCAAACTG[CG]CCTG[CG]CACTGGGCCTCAC[CG][CG]GACT
A[CG]ACTCCCACAATGC[CG][CG]AGGCTGTGC[CG][CG]CA
C[CG]GGG[CG]AGCAAGGGAGC[CG]TGACAGGTGACAGTG[CG
]CATGGCCAATCAGA[CG][CG]AGTGTGGCCTCC[CG]G[CG]T
CC[CG]CCCACTC[CG]G[CG]CCTG[CG]TCATTTTGGGCACCA
TGGCAA[[CG]]AAGTAAACAAG[[CG]]GGTAAATAATAGACCC
CTGACAGCCAGAGACC[CG]GAGAAACAAAGA[CG]GTGAGAAA[
CG]GAGAAACAAAGACAAAAAGA[CG][CG]CAGAC[CG]GGAGG
SEQ ID NO: 5199
TA[CG]AGGGGCAGGGG[CG]TGGCAGGAGCCCTGCCTGGC[CG]
CCCCTGGTGGGAAAAGCCCCTAGGGGT[[CG]]AGGC[CG]AG[C
G]TGGAG[CG]GAGCTGGGGTG[CG]G[CG]AGGGGCAGCAGGAG
C[CG]C[CG]C[CG]CAGA[CG]CC[CG]GGG[CG]CAGAGGATC
AAGAGCCC[CG][CG]C[CG]G[CG]AGGAG[CG][CG]CTCAGC
[CG]GGCTTGGGAGC[CG]C[CG]C[CG]G[CG]CCAACTTTTCC
CAT[CG][CG]GGAG[CG]AAGAGCAG[CG]GAGAGAGGGGTCCC
AGAA[CG]AAGGTGG[CG]GCA[CG]AGCTCTG[CG]CTGG[CG]
GCTGTGGGGGGC[[CG]]G[[CG]]CTCAGGACCCCAACTCCATC
CAAGTTG[CG]C[CG][CG]GTGGGGG[CG]GG[CG]GAGG[CG]
G[CG]C[CG]GGCAGGTGG[CG]GC[CG]CTTGCC[CG]GGCTGG
GCTTGTGC[CG]AG[CG][CG]GGTC[CG]GA[CG]GAG[CG]AG
C[CG]C[CG]C[CG][CG][CG]GGGGTGGAGCTGAGCTGAAGTC
ACTGG[CG]GAG[CG]GG[CG][CG]GG[CG]CTGG[CG]GG[CG
]A[CG][CG]GGAGGGAGGGCAGG[CG]CTGC[CG]GGACTC[CG
]GG[CG]C[CG][CG]TCC[CG][CG]GC[CG]AGCTG[CG]CTG
[CG]CAC[CG]GGTCTC[CG]GG[CG]CTGGAGG[CG]C[CG]C[
CG]G[CG]ACCTC
SEQ ID NO: 5200
[CG][CG]C[CG]GACC[CG]CACCT[CG]G[CG]GG[CG]CCAC
ACACT[CG]GCAGCC[CG]AGC[CG][CG]GTAGC[CG]CAG[CG
]GGATGGAGG[CG]G[CG][CG]CA[CG]GAG[CG]CCC[CG]CA
GGCAGGC[CG]GGGG[CG]C[CG]CTTGTC[CG]GA[CG]GGGCT
CCTACTCTTGT[CG]A[CG]TGGGTCCTGGC[CG]G[CG]C[CG]
AGATCACTTGGGA[CG][CG]ACAGG[CG]GTCC[CG]GA[CG]C
C[CG]G[CG]GCCC[CG]GCTT[CG][CG]GCCAC[CG]G[CG]T
TGTCTCCACTCT[CG]C[CG][CG]GGCAGTGGCCAGCCAGTGGC
[CG]GAGGAGCTGG[CG]T[CG]G[CG][CG]GAGAGC[[CG]]C
[CG]TGCTGGGG[CG]C[CG]GGC[CG]GACCAGAGCTGCTGCCC
CAGCAGGG[CG]G[CG]GCAGAGG[CG]GTGAGATGCAGGTGGAA
GC[CG]GAGGGACATCAC[CG]GCAGG[CG]AG[CG]G[CG]GGG
C[CG]GGGCATCCCAGCTCCTGCCAAGCTTGG[CG]G[CG][CG]
AGGAGGAGT[[CG]]C[CG]GG[CG]CAGCCCCCAATCACCCAGG
AA[CG][CG]GGGA[[CG]]CCTGGGCCACTGCTC[CG]GC[CG]
ATGGTTCCAGAGGAAGC[CG]TCCCCTTGCTAAGGGTTCC[CG]G
GAGGAGGTGAAGG[CG]C[CG][CG]GGCTGGGGGGT[CG]G[CG
]GC
SEQ ID NO: 5201
GG[CG]C[CG]AGATCACTTGGGA[CG][CG]ACAGG[CG]GTCC
[CG]GA[CG]CC[CG]G[CG]GCCC[CG]GCTT[CG][CG]GCCA
C[CG]G[CG]TTGTCTCCACTCT[CG]C[CG][CG]GGCAGTGGC
CAGCCAGTGGC[CG]GAGGAGCTGG[CG]T[CG]G[CG][CG]GA
GAGC[[CG]]C[CG]TGCTGGGG[CG]C[CG]GGC[CG]GACCAG
AGCTGCTGCCCCAGCAGGG[CG]G[CG]GCAGAGG[CG]GTGAGA
TGCAGGTGGAAGC[CG]GAGGGACATCAC[CG]GCAGG[CG]AG[
CG]G[CG]GGGC[CG]GGGCATCCCAGCTCCTGCCAAGCTTGG[C
G]G[CG][CG]AGGAGGAGT[[CG]]C[CG]GG[CG]CAGCCCCC
AATCACCCAGGAA[CG][CG]GGGA[[CG]]CCTGGGCCACTGCT
C[CG]GC[CG]ATGGTTCCAGAGGAAGC[CG]TCCCCTTGCTAAG
GGTTCC[CG]GGAGGAGGTGAAGG[CG]C[CG][CG]GGCTGGGG
GGT[CG]G[CG]GCTGAAGACCTC[CG]GCTGCCCAGCACCTCCT
T[CG][CG]CTGAC[CG]GGGACT[CG]GCCCACAACCAAGCCAT
GGTGCACTGGT[CG]GGACACAACAGCAG[CG]TGAGTACCCACC
[CG]G[CG]G[CG]GGTC[CG]CCTGTTTCCTGACAC[CG]AAGG
GGAATGGGGGGGTGGGTG
SEQ ID NO: 5202
[CG]GGGCAGCAGG[CG]GGCAGTAGCAGCAACAGCAGGGCCAG[
CG]CCACCCCCAGGCAGGATC[CG]CAGC[CG]CC[CG]GCT[CG
][CG]CAG[CG]CCCCC[CG]G[CG]CC[CG]GGCATCATCAGC[
CG]CAGCC[CG]AGTGGCCCC[CG]GC[CG]GG[CG]CCTGCAT[
CG]GGACTGGTGGGAGG[CG]G[CG][CG][CG]GGGGTGGAGGC
[CG]G[CG]C[CG]G[CG][CG]AG[CG]G[CG][CG]GAAGGG[
CG][CG]AAGGAA[CG][CG][CG]GAGCT[CG]CAGCAGCCTC[
CG]GGGGCCTT[CG]TCCC[CG]GCTCTGA[CG]TTCAAGGCCAG
GGT[CG]TTCTCAGAAGAAAGG[CG]CCTGTGAACCTGTCAGGGC
ACAGAACCCAAAGCCTTACAC[CG]GGAGGTGGAGCCAC[CG]GG
AAGAAGGGGGACTGGGAGCAGGTGCCTG[CG]GCT[CG]GGGGTT
CTCCC[CG]AAGGCCACCCCCTTGGTCC[CG][CG]CACAGCCAA
CC[CG]CTTTC[CG]ATCTGGCACAACAGGTC[CG]GAGAAA[CG
]CC[CG]GG[CG]CAGCTGGCAG[CG]CATCCCTGAAGGCTCC[C
G]AGCAG[CG][CG][CG]GGGCTG[CG]A[CG]AGGGAGGGGGC
[CG][CG]CTTCTGCAGGTCCT[CG]T[CG]CTAAGA[CG]GGCC
C[CG]AGACCCTCAGA
SEQ ID NO: 5203
GAGGGGCAGGGG[CG]TGGCAGGAGCCCTGCCTGGC[CG]CCCCT
GGTGGGAAAAGCCCCTAGGGGT[[CG]]AGGC[CG]AG[CG]TGG
AG[CG]GAGCTGGGGTG[CG]G[CG]AGGGGCAGCAGGAGC[CG]
C[CG]C[CG]CAGA[CG]CC[CG]GGG[CG]CAGAGGATCAAGAG
CCC[CG][CG]C[CG]G[CG]AGGAG[CG][CG]CTCAGC[CG]G
GCTTGGGAGC[CG]C[CG]C[CG]G[CG]CCAACTTTTCCCAT[C
G][CG]GGAG[CG]AAGAGCAG[CG]GAGAGAGGGGTCCCAGAA[
CG]AAGGTGG[CG]GCA[CG]AGCTCTG[CG]CTGG[CG]GCTGT
GGGGGGC[[CG]]G[CG]CTCAGGACCCCAACTCCATCCAAGTTG
[CG]C[CG][CG]GTGGGGG[CG]GG[CG]GAGG[CG]G[CG]C[
CG]GGCAGGTGG[CG]GC[CG]CTTGCC[CG]GGCTGGGCTTGTG
C[CG]AG[CG][CG]GGTC[CG]GA[CG]GAG[CG]AGC[CG]C[
CG]C[CG][CG][CG]GGGGTGGAGCTGAGCTGAAGTCACTGG[C
G]GAG[CG]GG[CG][CG]GG[CG]CTGG[CG]GG[CG]A[[CG]
][CG]GGAGGGAGGGCAGG[CG]CTGC[CG]GGACTC[CG]GG[C
G]C[CG][CG]TCC[CG][CG]GC[CG]AGCTG[CG]CTG[CG]C
AC[CG]GGTCTC[CG]GG[CG]CTGGAGG[CG]C[CG]C[CG]G[
CG]ACCTCCCC
SEQ ID NO: 5204
CAAGAGAAAAGGCACAAAAACCCTATTGAGAGGCCC[CG]GC[CG
]CTCCTGG[CG]TAGTCCATCACATGGCAATAGTCCTATTTAAGC
[CG][[CG]][[CG]][CG]G[CG]CCTTTCAGCACCACTAG[CG
]CTGGCCAGCACCC[CG][[CG]]CTCTTTGGG[CG]GTGCCCA[
CG]GCAGCAGAGGCTACTGTTTCAGCCTAGGTCTCAGC[CG][CG
][CG]TTCAGCCTCCTGGGCAGAGGCAGCTG[CG]GGATAC[CG]
[CG]GCCAGGGAAAG[CG][[CG]]TGGAGAGC[CG]AAAGGTG[
CG]GTGGG[CG]CAGAGGG[CG]GGCTGGCTG[CG]GGG[CG]AC
[CG][CG][CG]C[CG]GGGCCATGC[CG][CG]CTCCTTCCTGG
TGGACT[CG]CTAGTGCTG[CG][CG]AGG[CG]GG[CG]AGAAG
AAGG[CG]CC[CG]AGGGCAGCC[CG]C[CG]C[CG]CTCTTCCC
CTA[CG]CTGTGCCCC[CG]C[CG]CA[CG][CG]CTGCA[CG]G
TCTCT[CG]CCTGG[CG]CCTGCCA[CG][CG][CG]CAAGGCTG
GGCTGCTGTG[CG]TGTGCC[CG]CTCTG[CG]TCAC[CG]CCT[
CG]CAGCTGCATGGGCCCCC[CG]GGC[CG]CC[CG][CG]CTGC
CTCTACTCAAGGCTTCCTTCCCACCCTT[CG]GCT[CG]CAGTAC
TGCCA[CG][CG]CCCCTGG
SEQ ID NO: 5205
AACCTGAGGTCAGAGCTGAGG[CG]TAGGGGC[CG]GGGTAGGGG
CAGAGGTGC[CG]AAA[CG]CACTAGCTGGGGACTCC[CG]GGGG
AAGGAGATAGGAGAGACCCAAGG[CG]AGCCTTAGGACT[CG]CC
CCTATGACTATGACTA[CG][CG]CTG[CG]TC[CG]AACCACAT
GTCCACCC[CG]CATTTGCCTT[CG]GGGACCAGAC[CG][CG]C
TCCCTCAGATGGCTGGGGAGGGAGCAGACTC[CG]GGTGAAGGCT
GGGGGAGGTAC[CG]GGATGC[CG]AGTA[CG]CCAGAGCAGG[C
G]GGGGATGGGTTC[CG]GCTTCCTGC[CG]CCT[CG]GCATCT[
CG]CTTTGCAC[CG]GGCAAAGAAGGGGCCA[CG]AC[CG]G[CG
]AAGAG[CG][CG]TGGAGACACAGGGACC[CG][CG]ATCCAGG
GGCAGGAACCC[CG]CCCCCTCC[CG]GAAACCTCC[CG]GGCCC
TGAGT[CG]TGCC[CG]G[CG]CTCCCCACCCCACCCCACCCC[C
G]C[CG]CCCCTGC[CG]TCACTCA[CG]GC[CG]CTG[CG]GGC
TGGCTAG[CG]TGTG[CG]CTCTC[CG][CG][CG]CAGGCACCT
GCT[CG]CTGGG[CG]CTGTG[CG]CTCACTTCTCCCT[CG][CG
]CACTGCAGACTCC[CG]G[CG]CTGC[CG]C[CG]CCAC
SEQ ID NO: 5206
TTACCTGGGATCAGCAGGGAGCC[CG]GG[CG][CG]C[CG][CG
]G[CG]TGGGGACTAGGCT[CG]GG[CG][CG][CG]TCCT[CG]
G[CG]G[CG]GTG[CG]CAGGAGACT[CG]GG[CG]TGGGGAGGA
AGC[CG]CAGCCCAGGGCTGCT[[CG]]C[CG]CTGTTCCCCC[C
G]CCCCCTGTTGCAGGAGACAC[CG]AGGCTC[CG][CG]GAGCT
G[CG]G[[CG]]GGGGCCCA[CG]CCCAGAGAC[CG]TG[CG]AG
GAAAGCCAACCT[CG]TCCTGCCTGCCCTCCCAGC[CG][[CG]]
GGGGAGGGGGCCAC[CG]CAGTACTTCAGGACAGTTACATGGGCA
CAGCCTCCTC[CG]TCCTGG[CG]CAGGGTCAGGCTC[[CG]][C
G]GA[CG]A[CG]CCTGGAGACAGCTGCCAATGCCAATAGCTTTA
GCCCTTTATTCCCACTTAGATGATGGCCTGGCCTCTCCAGACCCC
TCTCCCCTCCCAGACATCCCCTGTGAGAAAGGAGGGAGAGGGTGT
TCCTGACCTTCAGGTGAGTTATTTATTGGCTAGGGACTGCAGTAT
TTTTTTTTTCTTTTTGGAAAGAAAATAAAATCAAGTTGGTGGTGT
CTTCAAGTCATGTTAATAGAGAAGATCTGAATTAATGCTTGATAA
GAGAAGT
SEQ ID NO: 5207
TGCCCCACCCCAACCTGAGGTCAGAGCTGAGG[CG]TAGGGGC[C
G]GGGTAGGGGCAGAGGTGC[CG]AAA[CG]CACTAGCTGGGGAC
TCC[CG]GGGGAAGGAGATAGGAGAGACCCAAGG[CG]AGCCTTA
GGACT[CG]CCCCTATGACTATGACTA[CG][CG]CTG[CG]TC[
CG]AACCACATGTCCACCC[CG]CATTTGCCTT[CG]GGGACCAG
AC[CG][CG]CTCCCTCAGATGGCTGGGGAGGGAGCAGACTC[CG
]GGTGAAGGCTGGGGGAGGTAC[CG]GGATGC[CG]AGTA[CG]C
CAGAGCAGG[CG]GGGGATGGGTTC[CG]GCTTCCTGC[CG]CCT
[CG]GCATCT[CG]CTTTGCAC[CG]GGCAAAGAAGGGGCCA[CG
]AC[CG]G[CG]AAGAG[CG][CG]TGGAGACACAGGGACC[CG]
[CG]ATCCAGGGGCAGGAACCC[CG]CCCCCTCC[CG]GAAACCT
CC[CG]GGCCCTGAGT[CG]TGCC[CG]G[CG]CTCCCCACCCCA
CCCCACCCC[CG]C[CG]CCCCTGC[CG]TCACTCA[CG]GC[CG
]CTG[CG]GGCTGGCTAG[CG]TGTG[CG]CTCTC[CG][CG]C[
CG]CAGGCACCTGCT[CG]CTGGG[CG]CTGTG[CG]CTCACTTC
TCCCT[CG][CG]CACTGCAGACTCC[CG]G[CG]CT
SEQ ID NO: 5208
[CG]GG[CG][CG]C[CG][CG]G[CG]TGGGGACTAGGCT[CG]
GG[CG][CG][CG]TCCT[CG]G[CG]G[CG]GTG[CG]CAGGAG
ACT[CG]GG[CG]TGGGGAGGAAGC[CG]CAGCCCAGGGCTGCT[
CG]C[CG]CTGTTCCCCC[CG]CCCCCTGTTGCAGGAGACAC[CG
]AGGCTC[CG][CG]GAGCTG[CG]G[CG]GGGGCCCA[CG]CCC
AGAGAC[CG]TG[CG]AGGAAAGCCAACCT[CG]TCCTGCCTGCC
CTCCCAGC[CG][CG]GGGGAGGGGGCCAC[[CG]]CAGTACTTC
AGGACAGTTACATGGGCACAGCCTCCTC[CG]TCCTGG[CG]CAG
GGTCAGGCTC[[CG]][CG]GA[[CG]]A[CG]CCTGGAGACAGC
TGCCAATGCCAATAGCTTTAGCCCTTTATTCCCACTTAGATGATG
GCCTGGCCTCTCCAGACCCCTCTCCCCTCCCAGACATCCCCTGTG
AGAAAGGAGGGAGAGGGTGTTCCTGACCTTCAGGTGAGTTATTTA
TTGGCTAGGGACTGCAGTATTTTTTTTTTCTTTTTGGAAAGAAAA
TAAAATCAAGTTGGTGGTGTCTTCAAGTCATGTTAATAGAGAAGA
TCTGAATTAATGCTTGATAAGAGAAGT[CG]CCCATTTTTCAGCA
ACTCAGCTA
SEQ ID NO: 5209
AGGGGAAAAGGTGGGTGCACAG[CG]GGTTCTCAGAGGGTGCTCC
TGAGCCCCCTGGAGCTC[CG]GGTACT[CG]GC[CG]GC[CG]G[
CG]GCCACT[CG]GCAG[CG]CTG[CG]GGCTGC[CG]GGAACTG
TTCTC[CG]CT[CG]GGGTGCTGAAAG[CG]GA[[CG]][CG]GG
AGAG[CG][[CG]]CAGAGAAGG[CG]AGGAGC[CG]GGT[CG]G
CCAGGCTCTCCTGCAGG[CG][CG]GGTCCTGCT[CG][CG]GGG
[CG]TCTCTAGAACTCACTCCTTCTT[CG]C[CG]AACTCTTTCT
[CG]CTTCCTGCCAGGTTGCCTCATGTCTCTCTCTCTCTGAGCTG
[[CG]]AACCCCCTCCTCCCAGCCCTGA[CG]TGAG[CG]CCTAC
ACCAGC[CG]C[CG]C[CG]CAGCTGC[CG]AG[CG]GGG[CG][
CG][CG]C[CG]TTCTCCCAGC[CG][CG]TGCCTGC[CG]AGAG
GC[CG][CG]GGAC[CG]GGCA[CG][CG][CG][CG][CG]TTC
CCAGGGGCCTGGGAG[CG]GCC[CG]AGGG[CG]GCCC[CG]GG[
CG]GTG[CG][CG]CTCCC[CG]AG[CG][CG]TCCT[CG]GGGC
TG[CG][CG][CG][CG][CG]G[CG]GCAAGG[CG]AGGTGC[C
G]GCAGG[CG]GTGGT[CG][CG]CTGGTGTACAA[CG]CC[CG]
CAGCAG[CG][CG]G[CG]TTCAGGTG[CG]G[CG]T[CG]G[CG
]GGCA
SEQ ID NO: 5210
GCTCCCTTCTTCCTCTCCACTTGCTCTCAATAGAGGG[CG][CG]
CTGGG[CG]AAGTAGGGG[[CG]]TGGCAGGAGCCC[CG]CTC[C
G][CG]GATCCAGGTTGAAATTCCTCCCTCCTGGAATC[CG]AC[
CG]TGAGCATTTCTGAG[CG]GTGGTGAGGAGGAGGCCACCAAGA
CACCTCCCTCC[CG]CTGTGCAAAGGAA[CG]CAGGAGCC[CG]G
[CG]CAGGTGGTGGGCTTAC[CG][CG][[CG]]CA[CG]CCTGG
CTGGAGAGGTGA[CG]C[CG]CTGTCTGCCAACCTTTCCCAGCTT
TTCCCA[CG]ATTGGAGCCAAGAGAGGTCCC[[CG]]GGGATCTC
AGTTGGGCAATTGTAAGGGAAGGAGCTCAGGACACTGACTTCAAG
ATGAAGGGGGAGGTCAG[CG]AAGACAGTTCTAGGGTGGG[CG]G
[CG]GC[CG]CTGACAGAGCAGGAGCCACAGCCAC[CG]GGGCTT
GGAGATAGGAGCAAGT[CG]CAGG[CG]GAGGGGGCTG[CG]GGC
TGGCTGCCTGGGCAGCACAGGACTTGAGGGAGCTG[CG]GGGACT
CCTGGAGTCTCATCAGGCCTTCCAGT[CG]CTGTGGGGACCC[CG
]GCTG[CG][CG][CG]GAT[CG]CCTG[CG]CCACTGTCCCCAC
TGACC
SEQ ID NO: 5211
GGGCTCCTGGGGTCC[CG]ACCCC[CG]G[CG]CACTTGC[CG]C
ACATACC[CG]CTGCCAGAGG[CG]AGGGAG[CG]AGGTGCCCTG
GCAGATT[CG]AG[CG]GCCACCCCCAGC[CG]CTGAGC[CG]AG
CTTCTGCTGC[CG]C[CG]CTGC[CG]CTG[CG]CTCCCAGC[CG
]CTGCCTG[CG]CCCTCCCTGC[CG]CCCCCT[CG]GGTG[CG]G
GCTCCAGCCCC[CG][CG]CTGGGGAGC[CG]G[CG]AG[CG]TG
AGG[CG][CG]GGCCAGGGGCTG[CG]GG[CG]CAGGACCCCAGC
CC[CG]GATCACCTGGGCT[CG]C[CG][CG]CAT[CG]TCCTTC
TCCCCAAC[[CG]]AGC[CG]GACTCCA[[CG]]GGCTCAACAGC
CCCCAGCCC[CG]GTGGTCCC[CG]CTGCCCTGCC[CG]CTGC[C
G]CCCCCACTGGG[CG]CCAGGGACAG[CG]GGGGTGC[CG]CTC
TGC[CG]GCAGGG[CG]CACAGGGGAGTGGGCACAGAGG[CG]GG
CTGGAG[[CG]]ATCTCACC[CG]TTC[CG]GGCTGGCCAGCA[C
G][CG]CCCTCCCTGGC[CG]GAG[CG]CTGCTCATCTGATGGAG
GGCAGGAAGGAGCCCTGGGCTGACTGCAGGCTCCTGGGTGACCTT
GGACAAGTTGGTTAGCCTCTCTGAGTGCCCACTTCCTCT
SEQ ID NO: 5212
G[CG]GTTT[CG]GAGGGAGCTGGGCTGTGGAGGGAGGG[CG]GC
CTCTTCACCAG[CG]T[CG]TC[CG]ACCACCC[CG][CG]CCCT
CCTGGTGGCTCTCCCA[CG]CCCCATT[CG]CACCCCAGGTCCT[
CG]GGGTGTCTCTGGTGTTGCTTCAAGTTAGGCAAGAGGAGCTGG
GGG[CG][CG]GGGAGCC[CG]G[CG]C[CG]CAG[CG][CG]TG
[CG]TGGCTGGGG[CG]CCC[CG]GGGC[CG]GCTGCACCTTCAG
T[CG]CCCCCTGGC[CG]GCCTGCCTGCCT[CG]ACCTC[CG]CA
TCCCCTTGCAC[CG]TC[CG]CT[CG][CG]TGCTG[CG]GGGCA
CT[CG]CAGCACTACCTT[CG]GTGGGGC[CG]CAGCACCCTGAG
CTCC[CG]GGACTCCCCCAC[CG]CCCC[CG]CACCCA[CG]ACC
[CG][CG]TGGTCCCAGCCCCTCCACCCTCTTCA[CG]CACCCT[
CG]CACCCTTTTGTG[CG]ACCC[CG]TGCCCTCTC[CG]GGCTG
CCAACCCCTGCCACCCAGGTGCCAGTCC[CG]GG[CG][CG]GGG
AGGAGGC[CG]GTGGGGAAGGGGG[CG]GAGGGGC[CG]GGGTGG
AGGAGGAGCTG[CG][CG]AGGGGCCTGGGGG[CG]GGGAG[CG]
AGGAGAG[CG]CT[CG]GAATGTGTGC[CG]GTCTCTAGGT
SEQ ID NO: 5213
CCCAGGTCCT[CG]GGGTGTCTCTGGTGTTGCTTCAAGTTAGGCA
AGAGGAGCTGGGGG[CG][CG]GGGAGCC[CG]G[CG]C[CG]CA
G[CG][CG]TG[CG]TGGCTGGGG[CG]CCC[CG]GGGC[CG]GC
TGCACCTTCAGT[CG]CCCCCTGGC[CG]GCCTGCCTGCCT[CG]
ACCTC[CG]CATCCCCTTGCAC[CG]TC[CG]CT[CG][CG]TGC
TG[CG]GGGCACT[[CG]]CAGCACTACCTT[CG]GTGGGGC[CG
]CAGCACCCTGAGCTCC[CG]GGACTCCCCCAC[CG]CCCC[CG]
CACCCA[CG]ACC[CG][CG]TGGTCCCAGCCCCTCCACCCTCTT
CA[CG]CACCCT[CG]CACCCTTTTGTG[CG]ACCC[CG]TGCCC
TCTC[CG]GGCTGCCAACCCCTGCCACCCAGGTGCCAGTCC[CG]
GG[CG][CG]GGGAGGAGGC[CG]GTGGGGAAGGGGG[CG]GAGG
GGC[CG]GGGTGGAGGAGGAGCTG[CG][CG]AGGGGCCTGGGGG
[CG]GGGAG[CG]AGGAGAG[CG]CT[CG]GAATGTGTGC[CG]G
TCTCTAGGTGGTGCCAAATTCTGGGGCCTAGGCATTTCCCT[CG]
CTTTATGTTTTTGGTTTTTTTTCTTCCTTCAATCTCTTTGATTAG
GC[CG]TA[CG]TGGCTGTGGCAAGGAGT
SEQ ID NO: 5214
CT[CG]GGGTGTCTCTGGTGTTGCTTCAAGTTAGGCAAGAGGAGC
TGGGGG[CG][CG]GGGAGCC[CG]G[CG]C[CG]CAG[CG][CG
]TG[CG]TGGCTGGGG[CG]CCC[CG]GGGC[CG]GCTGCACCTT
CAGT[CG]CCCCCTGGC[CG]GCCTGCCTGCCT[CG]ACCTC[CG
]CATCCCCTTGCAC[CG]TC[CG]CT[CG][CG]TGCTG[CG]GG
GCACT[CG]CAGCACTACCTT[CG]GTGGGGC[CG]CAGCACCCT
GAGCTCC[CG]GGACTCCCCCAC[CG]CCCC[CG]CACCCA[CG]
ACC[CG][CG]TGGTCCCAGCCCCTCCACCCTCTTCA[[CG]]CA
CCCT[CG]CACCCTTTTGTG[CG]ACCC[CG]TGCCCTCTC[CG]
GGCTGCCAACCCCTGCCACCCAGGTGCCAGTCC[CG]GG[CG][C
G]GGGAGGAGGC[CG]GTGGGGAAGGGGG[CG]GAGGGGC[CG]G
GGTGGAGGAGGAGCTG[CG][CG]AGGGGCCTGGGGG[CG]GGGA
G[CG]AGGAGAG[CG]CT[CG]GAATGTGTGC[CG]GTCTCTAGG
TGGTGCCAAATTCTGGGGCCTAGGCATTTCCCT[CG]CTTTATGT
TTTTGGTTTTTTTTCTTCCTTCAATCTCTTTGATTAGGC[CG]TA
[CG]TGGCTGTGGCAAGGAGTTGGGGAAA
SEQ ID NO: 5215
AATCCTACAGGTGGCTGTGACC[CG]GGCCCCTAC[CG]TTTTCC
TGGACCCTCCTTGCCTGCTCCATTTTCCAAGCCCTCCCCAATTGC
TGCAGACTGGAGTAGCC[CG]GTCTTCACTCCAATCT[CG]CTCT
CCCCTCTCCTCTCCACTTCCTCTCAAGC[CG]AGCTTGGTCATGA
GTTAG[CG]CCCATAG[CG]ATGT[CG]GAGAGTTCCTGGGGAGA
GGGGCCAGGTGATGGGAGTGTCTGTAGGGTGGGCTTGAACAGAGA
GGGTGTCTTTTCCCTTAGGGGAGGAACACCCATGCTGAAGTCCCT
T[CG]CTCTG[CG]CCTAGCTTGGCACCCCT[CG]GG[CG]TCCT
TAGCC[CG]AGGTCCCAGCCAGCCCTGGAGCT[CG]GGAGAG[CG
]G[CG]TGCACCATCCCAGTTTAAC[CG][CG]CCTGCAGTGCCC
AGC[CG]GGATGAGCACTTGGCC[CG]AGGCTGCTCACCAGG[[C
G]]CCTCCTCTCCCTTCC[CG]G[CG]CCTACTCTGGCTTGGAAG
[CG][CG]GGCCCCAC[CG]AGC[CG]CAGGGAAACCTCTGCTTC
TTTC[CG]ACTTAGAAGCCTAGACCCCATTTTCTTGGATCCTCTG
GACTCCAGCAGAGGGAAATTT[CG]CAACT
SEQ ID NO: 5216
C[CG]ACCCC[CG]G[CG]CACTTGC[CG]CACATACC[CG]CTG
CCAGAGG[CG]AGGGAG[CG]AGGTGCCCTGGCAGATT[CG]AG[
CG]GCCACCCCCAGC[CG]CTGAGC[CG]AGCTTCTGCTGC[CG]
C[CG]CTGC[CG]CTG[CG]CTCCCAGC[CG]CTGCCTG[CG]CC
CTCCCTGC[CG]CCCCCT[CG]GGTG[CG]GGCTCCAGCCCC[CG
][CG]CTGGGGAGC[CG]G[CG]AG[CG]TGAGG[CG][CG]GGC
CAGGGGCTG[CG]GG[CG]CAGGACCCCAGCCC[CG]GATCACCT
GGGCT[CG]C[CG][CG]CAT[CG]TCCTTCTCCCCAAC[CG]AG
C[CG]GACTCCA[CG]GGCTCAACAGCCCCCAGCCC[CG]GTGGT
CCC[CG]CTGCCCTGCC[CG]CTGC[CG]CCCCCACTGGG[CG]C
CAGGGACAG[CG]GGGGTGC[CG]CTCTGC[CG]GCAGGG[CG]C
ACAGGGGAGTGGGCACAGAGG[CG]GGCTGGAG[[CG]]ATCTCA
CC[CG]TTC[[CG]]GGCTGGCCAGCA[CG][CG]CCCTCCCTGG
C[CG]GAG[CG]CTGCTCATCTGATGGAGGGCAGGAAGGAGCCCT
GGGCTGACTGCAGGCTCCTGGGTGACCTTGGACAAGTTGGTTAGC
CTCTCTGAGTGCCCACTTCCTCTATTCAAATATAATA
SEQ ID NO: 5217
[CG]TCCAGAACACAGAAAATAGACTCATCTCCTAATT[CG]CCA
GGGAGCT[CG]AGGGCTG[CG]GGGC[[CG]][CG]GGGCTGCCT
CCCC[CG]CTCCTCCCCCAACC[CG]ACCCCACCCCACCCC[CG]
CCAGGGCTT[CG]G[CG]GCCTCC[CG]GAGTCACACAGCCTACC
CCCCCACCCCAACACCCCCTCCCC[CG]GCAGACAAAGGGCCTGG
GCAAATT[CG]C[CG]CC[CG]GCCTCCTAG[CG]CTC[CG]GGG
AGGC[CG]CTG[CG]CCC[CG]GAGTGGAT[CG][CG]CTGGAGG
[CG]TG[CG]C[CG]GG[CG]AGAAGC[CG][CG]GC[CG][CG]
GGAG[[CG]]CAGTATGGGGAAGAAC[CG][[CG]]AGATG[CG]
CCTGACTCACATCTGCTGCTGCTGCCTCCTTTACCAGCTGGGGTT
CCTGT[CG]AATGGGAT[CG]TTTCAGGTAAGTTCTTC[CG]TGA
CTTTCT[CG]CTTCCTTTCCAGCCATCCCAG[CG]GAGAC[CG][
CG]AA[CG]TA[CG]GGT[CG]GCAGGGCTGGTGCAAC[CG]GTG
[[CG]]TGGAGAGCAGGGCTCAGTGGGTAGCAATAAAAATGAGCT
TGAGGTGCAGGTTAAGGGGTCAAGTT[CG]GAAATGAAGCACACT
TCTGC[CG]GCCT[CG]TTTTAAC[CG]TATGTGG
SEQ ID NO: 5218
[CG]ATGGTCCCCCAAAACCTCAGCAGCTGCTTAAGCAAG[CG]G
CCAGATCCCACCCTGACCTGCTGTGGCCAGAGATCTAGAAATGGG
GC[CG]AGGAGAAGGACAGCTTCTGAGGCCTGACTTGCAAGCAGC
TTTCTT[CG]CCT[CG]TTCT[CG]GGGCTTCAGGGAGG[CG]G[
CG]ACTGGAGCCC[CG]CTGCCTACTCACAACAAAAGAAAGCAGG
GCTGG[CG]CCCCTACA[CG][CG]CTCCCATTCACTGC[CG]GC
[CG][CG]GGGAGAATCCTACCC[CG][CG]CCCT[CG]CCAGGG
TCC[CG]GGGAGCTCTGGGCTGG[[CG]]GAGG[CG]AACAAGAT
G[CG]GTTTGACAGAACCAGGC[CG]TGCTTCTGCAAACCTCAAT
GC[CG]CTC[CG]CCAGC[CG][CG]G[CG]GCCTCCCAGACTCC
ATTTGC[CG]GGGAGCTC[[CG]]AGC[CG][CG]CAAAATCTCT
GCAAGCTGTGCTCTGCAGAATGCAAAGC[CG]GGCTGGAATC[CG
]CCATTCC[CG]C[CG]CCCCAGC[CG]ACT[CG]GC[CG]A[CG
]AGCTCCCTCCTGAGCCTCC[CG]GGCCATCTGC[CG]GGA[CG]
GTTACCT[CG]TT[CG]GTGAAGC[CG]GTGCATTCACCACATCC
TCTGCTGCTCCTAGCAGGGAA
SEQ ID NO: 5219
TAGACTCATCTCCTAATT[[CG]]CCAGGGAGCT[CG]AGGGCTG
[CG]GGGC[CG][CG]GGGCTGCCTCCCC[CG]CTCCTCCCCCAA
CC[CG]ACCCCACCCCACCCC[CG]CCAGGGCTT[CG]G[CG]GC
CTCC[CG]GAGTCACACAGCCTACCCCCCCACCCCAACACCCCCT
CCCC[CG]GCAGACAAAGGGCCTGGGCAAATT[CG]C[CG]CC[C
G]GCCTCCTAG[CG]CTC[CG]GGGAGGC[CG]CTG[CG]CCC[C
G]GAGTGGAT[CG][CG]CTGGAGG[CG]TG[CG]C[CG]GG[CG
]AGAAGC[CG][CG]GC[CG][CG]GGAG[CG]CAGTATGGGGAA
GAAC[CG][CG]AGATG[CG]CCTGACTCACATCTGCTGCTGCTG
CCTCCTTTACCAGCTGGGGTTCCTGT[CG]AATGGGAT[CG]TTT
CAGGTAAGTTCTTC[CG]TGACTTTCT[CG]CTTCCTTTCCAGCC
ATCCCAG[CG]GAGAC[CG][CG]AA[CG]TA[CG]GGT[CG]GC
AGGGCTGGTGCAAC[CG]GTG[[CG]]TGGAGAGCAGGGCTCAGT
GGGTAGCAATAAAAATGAGCTTGAGGTGCAGGTTAAGGGGTCAAG
TT[CG]GAAATGAAGCACACTTCTGC[CG]GCCT[CG]TTTTAAC
[CG]TATGTGGAATAGTTTCCTTCTAATT
SEQ ID NO: 5220
GACTCATCTCCTAATT[CG]CCAGGGAGCT[CG]AGGGCTG[CG]
GGGC[CG][CG]GGGCTGCCTCCCC[CG]CTCCTCCCCCAACC[C
G]ACCCCACCCCACCCC[CG]CCAGGGCTT[CG]G[CG]GCCTCC
[CG]GAGTCACACAGCCTACCCCCCCACCCCAACACCCCCTCCCC
[CG]GCAGACAAAGGGCCTGGGCAAATT[CG]C[CG]CC[CG]GC
CTCCTAG[CG]CTC[CG]GGGAGGC[CG]CTG[CG]CCC[CG]GA
GTGGAT[CG][CG]CTGGAGG[CG]TG[CG]C[CG]GG[CG]AGA
AGC[CG][CG]GC[CG][CG]GGAG[[CG]]CAGTATGGGGAAGA
AC[CG][[CG]]AGATG[CG]CCTGACTCACATCTGCTGCTGCTG
CCTCCTTTACCAGCTGGGGTTCCTGT[CG]AATGGGAT[[CG]]T
TTCAGGTAAGTTCTTC[CG]TGACTTTCT[CG]CTTCCTTTCCAG
CCATCCCAG[CG]GAGAC[CG][CG]AA[CG]TA[CG]GGT[CG]
GCAGGGCTGGTGCAAC[CG]GTG[[CG]]TGGAGAGCAGGGCTCA
GTGGGTAGCAATAAAAATGAGCTTGAGGTGCAGGTTAAGGGGTCA
AGTT[CG]GAAATGAAGCACACTTCTGC[CG]GCCT[CG]TTTTA
AC[CG]TATGTGGAATAGTTTCCTTCTAATTAG
SEQ ID NO: 5221
CAAGGTGGGAGGCTGTG[CG]GCCCCAGG[CG][CG]G[CG][CG
]CTC[CG]C[CG]TGGG[CG]GG[CG]G[CG]ATCCCTGAGTC[C
G]GCACCTGTG[CG]C[CG]CTCCCTCTGTGCCTCC[CG]GGCAG
CCC[CG]CCTGC[CG]GCCT[CG]GAGTC[CG][CG]G[CG]C[C
G]G[[CG]]GCTAGAGGTCCAGAGG[[CG]]AACCACTTGCTGGT
GCAGAAGAGAAACCCTCAAATCCCTGGCCTTT[CG][CG]GAGA[
CG]CCTGGA[CG]GGGC[CG]TG[CG]C[CG]TGGACTGAGCAGG
[CG]TCT[CG]GGGAGCACTTCTGCAGAG[CG]AGGACTTCCATG
TGAG[CG]ATTC[CG]TTCTCCCCACCACCAATC[CG]ACCTCCC
AGC[CG]TCTC[CG]C[CG]CC[CG]AGCATCCTTGAGGTGGGA[
CG]AGCAGGGGCTTGGATCCCTGC[CG]GC[CG]TCTGGTGTGTG
AGGCTTGCA[CG]GCCCCTGGCTGCCC[CG][CG]CCT[CG]C[C
G]GAGCC[CG]AGGGGG[CG]CAGGTC[CG]GGG[CG]AGGGC[[
CG]]GC[[CG]]GGCTGTTTGATGGCTTCACTGAGAAGAGTCAAA
GTGCTGTTGGTGTTGAACTTGAT[CG][CG]GTAGC[CG]GCTT[
CG]TGCTCTTCCTGGCCAAGTGC[CG]GCCCAT[CG][CG]GTG[
CG]CAG[CG]GAGA
SEQ ID NO: 5222
GAATGTCAAGCCTCCAGGTTCACAAATGGCTGGAGGTGCT[CG]G
GGTTAGCTCC[CG]AGGG[CG]GCAAG[CG]C[CG]AC[CG]GTC
CT[[CG]]CT[CG]CTAGGCAGG[CG]CCTC[CG]GATTC[CG]T
TCATGCCTCT[CG]GAGCTACAGGGCTTGGTG[CG]GAGA[CG]C
AGGG[CG]GG[[CG]][CG]CTGGGCTCTGGGTGTC[[CG]]CAA
CCCAAAGTGCAGCTGGTGTCTTGA[CG]CTAC[[CG]]TCTATGC
ACAAGC[CG]G[CG]G[CG]G[CG]G[[CG]]GAGCTTGGAGGAG
GCAGGGAGATTCCAAATAAATCCACTAATTCTGGGCTGAG[CG]C
TC[[CG]]G[CG]TG[CG]AGCC[CG]CCTGCCTGCCAAATGTAA
CTGTGAAGTGATGTGGAAAAGTGAGC[[CG]]GGTGCCTCCCCTG
A[CG]GATCTCATTGGGCAGAG[CG]CAGAGGCAGGTCTACCACT
TGGAAATTCATGTAAGCAGTCCCCCCTCCC[CG]CCCCCTCCC[C
G]CCTTCCCCCTT[CG]CTCTCC[CG][CG]CTGGCT[CG]AT[C
G]CTCTCTTTCCCCCTACCCAAGTGGG[CG]CACAACTTTT[CG]
CTCCT[CG]CTCC[CG]AGCAAGCCC[CG][CG][CG]TCTCTGC
[CG]CCAGAGCCA[CG]AGGTGAAGATG[CG]CCCTTCC
SEQ ID NO: 5223
[CG]GCAAG[[CG]]C[CG]AC[CG]GTCCT[CG]CT[CG]CTAG
GCAGG[CG]CCTC[CG]GATTC[CG]TTCATGCCTCT[CG]GAGC
TACAGGGCTTGGTG[CG]GAGA[CG]CAGGG[CG]GG[[CG]][C
G]CTGGGCTCTGGGTGTC[[CG]]CAACCCAAAGTGCAGCTGGTG
TCTTGA[CG]CTAC[[CG]]TCTATGCACAAGC[CG]G[CG]G[C
G]G[CG]G[[CG]]GAGCTTGGAGGAGGCAGGGAGATTCCAAATA
AATCCACTAATTCTGGGCTGAG[CG]CTC[[CG]]G[CG]TG[CG
]AGCC[CG]CCTGCCTGCCAAATGTAACTGTGAAGTGATGTGGAA
AAGTGAGC[[CG]]GGTGCCTCCCCTGA[CG]GATCTCATTGGGC
AGAG[CG]CAGAGGCAGGTCTACCACTTGGAAATTCATGTAAGCA
GTCCCCCCTCCC[CG]CCCCCTCCC[CG]CCTTCCCCCTT[CG]C
TCTCC[CG][CG]CTGGCT[CG]AT[CG]CTCTCTTTCCCCCTAC
CCAAGTGGG[CG]CACAACTTTT[CG]CTCCT[CG]CTCC[CG]A
GCAAGCCC[CG][CG][CG]TCTCTGC[CG]CCAGAGCCA[CG]A
GGTGAAGATG[CG]CCCTTC[CG][CG][CG]GTG[CG][CG]CA
GCC[CG]CTGAGGAC[CG]AGCTCCTGGATAAGTGGGCTGGCAGA
TAAT
SEQ ID NO: 5224
TCTTGCACACAAAGGG[[CG]]AAGAGAGGGG[CG]TGGGGAGGC
TGGAAAGCATGGTTGCCC[CG]CCTGGCC[CG]G[CG]A[CG]CC
[CG]CTCAGCAGCCTGCTGAGGAGTGGGGA[[CG]]AAGAGCAGC
CTAAACTTAGGGCT[CG]GGATATTT[CG]ATGCCACCCAAATTG
C[CG]TCCTACCCCAA[CG]AGGCAGGGAAAGGAG[CG]GAG[CG
][CG][CG][CG][CG]AGCTGAGTGAGTGCTTA[CG]T[CG]CA
G[CG]AGATCTGTGCTGGGATAATTAGAGAGGAGTTGGGCTGAGC
[CG]AGTCCTCTTTCAGCAGCAGCAGC[CG]GAGC[CG]C[CG]C
[CG]CAGCC[CG]GTGGGGCAACCCTGACT[CG]GAC[CG]CT[C
G]GGAGAGCCCCAGGAGAGGCCAG[CG]C[CG][CG]CAGCAGC[
CG]CCC[CG]CTG[CG]CCCACCTCCC[CG]GCTGCTCC[CG]GA
GGGCTCACAAAGG[CG]GTGGC[CG]CC[CG]AGTGGCCTTCTCC
ATCCAGG[CG]TT[CG][CG]TCCTCCTCCCCACCTTCTCTCC[C
G]AAGG[CG]AAAATGGCAGGGCCAGG[CG]AGAACCTGGGACAG
[[CG]]GTGGCCCTAGCCCTG[[CG]]ATCCTCACCCCTCCTGCT
AGGAGAGGCTG[CG]GGCTGCC[CG][CG]GA[CG]ATG
SEQ ID NO: 5225
CAACCA[CG]CCCTTGAG[CG]CTG[CG]GCTT[CG]GGAAGAAA
ACAGCTGCTGCTGTCAGGCCAGGCCTGGCTC[CG]CAGCC[CG]G
AGGGCCACCAGG[CG]GCTGGCATAGGC[CG]GGGAGGGGCTGGG
AT[CG]GTGGCTG[CG]ATGCCCTGTAGAGC[CG]AGGGAAGG[C
G][CG]AGTGCA[CG]TTAGAGTGACAATATTGGC[CG]GAC[CG
]AGCCCCAAT[CG]GGGAGCTCA[CG]GCCAGCTGAATT[CG]CT
GA[CG]TGTAGGAGAGGAAAGGACCC[CG]AGAACC[CG]GAAGC
CTAGATTCCTGC[CG]GAGCTGCAAGTGCTG[[CG]]GAAATGGG
GGAAGAAGGTTTCTGGG[[CG]]CTTTAAACAAATGGCTGCCTCC
CAG[CG]CTCTGAGTTAAGGGAC[[CG]]GCTACCTAG[[CG]]T
CTAGCTGAGGAGGAAGA[CG][CG]CAGCTGGAGAACTGTTGCCT
TTGTAGTTGCTTCTCC[CG]C[CG]CATCCAGGAAAAACAGG[CG
]CTTTGGGGCTGGTTAGAACAAACAAAGCCCCAATTCC[CG]AGC
CCTGTTGAGGCT[CG]GACAGAGAGGTTTG[CG]CACAACCTG[C
G]CTTCTG[CG]CAATCAG[CG]GCTCCTGAGCC[CG]GGTCTC[
CG]GCACCACCTGGT
SEQ ID NO: 5226
TGCACACAAAGGG[[CG]]AAGAGAGGGG[CG]TGGGGAGGCTGG
AAAGCATGGTTGCCC[CG]CCTGGCC[CG]G[CG]A[CG]CC[CG
]CTCAGCAGCCTGCTGAGGAGTGGGGA[[CG]]AAGAGCAGCCTA
AACTTAGGGCT[CG]GGATATTT[CG]ATGCCACCCAAATTGC[C
G]TCCTACCCCAA[CG]AGGCAGGGAAAGGAG[CG]GAG[CG][C
G][CG][CG][CG]AGCTGAGTGAGTGCTTA[CG]T[CG]CAG[C
G]AGATCTGTGCTGGGATAATTAGAGAGGAGTTGGGCTGAGC[CG
]AGTCCTCTTTCAGCAGCAGCAGC[CG]GAGC[[CG]]C[CG]C[
CG]CAGCC[CG]GTGGGGCAACCCTGACT[CG]GAC[CG]CT[CG
]GGAGAGCCCCAGGAGAGGCCAG[CG]C[CG][CG]CAGCAGC[C
G]CCC[CG]CTG[CG]CCCACCTCCC[CG]GCTGCTCC[CG]GAG
GGCTCACAAAGG[CG]GTGGC[CG]CC[CG]AGTGGCCTTCTCCA
TCCAGG[CG]TT[CG][CG]TCCTCCTCCCCACCTTCTCTCC[CG
]AAGG[CG]AAAATGGCAGGGCCAGG[CG]AGAACCTGGGACAG[
[CG]]GTGGCCCTAGCCCTG[[CG]]ATCCTCACCCCTCCTGCTA
GGAGAGGCTG[CG]GGCTGCC[CG][CG]GA[CG]ATGTGG
SEQ ID NO: 5227
TGGGAGC[CG]C[CG]C[CG]G[CG]CCAACTTTTCCCAT[CG][
CG]GGAG[CG]AAGAGCAG[CG]GAGAGAGGGGTCCCAGAA[CG]
AAGGTGG[CG]GCA[CG]AGCTCTG[CG]CTGG[CG]GCTGTGGG
GGGC[[CG]]G[[CG]]CTCAGGACCCCAACTCCATCCAAGTTG[
[CG]]C[CG][CG]GTGGGGG[CG]GG[CG]GAGG[CG]G[CG]C
[CG]GGCAGGTGG[CG]GC[CG]CTTGCC[CG]GGCTGGGCTTGT
GC[CG]AG[CG][CG]GGTC[CG]GA[CG]GAG[CG]AGC[CG]C
[CG][CG][CG][CG]GGGGTGGAGCTGAGCTGAAGTCACTGG[C
G]GAG[CG]GG[CG][CG]GG[[CG]]CTGG[[CG]]GG[[CG]]
A[CG][CG]GGAGGGAGGGCAGG[CG]CTGC[CG]GGACTC[CG]
GG[CG]C[CG][CG]TCC[CG][CG]GC[CG]AGCTG[CG]CTG[
CG]CAC[CG]GGTCTC[CG]GG[CG]CTGGAGG[CG]C[CG]C[C
G]G[CG]ACCTCCCCT[CG]GCCT[CG]CAGG[CG]CTGC[CG]C
[CG]CCTCTCCC[CG][CG]CCCACTCTG[CG]CCCC[CG][CG]
GC[CG][CG]GGTCC[CG]G[CG]CTGAGTC[CG][CG]CACCCT
GCC[CG][CG]GGGG[CG]GT[CG]ACCC[CG]GGCTCC[CG]GA
GCAGT[CG]ATGTGT[CG]GGAGCTTCCTATTCCTGCTTTATTGT
TTCTATGAGTCTATGTTGCTG
SEQ ID NO: 5228
TCCCTG[CG]CAA[CG]CCTCCT[CG]TCCTC[CG]AGATTTTCC
AATGGTGG[CG]CAAGCTCCTCCCT[CG]CC[CG]AGCTGGG[CG
]C[CG]TCCTAGAGCCAAG[CG]CC[CG]CTAGAGC[CG]AGACT
AGGGGG[CG]GTGAGGAGTGGGACC[CG]CT[CG][CG]GCCATT
GGTTGTG[CG]GCCAGGAGGGG[CG]GAGGGA[CG]A[CG][CG]
[CG]GGCTGTG[CG]GGGC[CG]GCAGCC[CG]GATCCACTCC[C
G]CTG[CG]CCTGCTGTC[CG]C[CG]TG[CG]CCCAGACTG[CG
][CG]C[CG][CG]C[CG]CTG[CG]CCCAACATTCC[CG]AGGA
[CG]GCTT[CG][CG]GG[CG][[CG]]TAT[CG]TCCAGAC[CG
]GAGCAC[CG]CCCCAC[CG]CTAG[CG]CAGGAGACCTGC[CG]
GGGAAGT[CG][[CG]]TGTCCTGACCTGCAGGTCAGTGAGGGAA
ACTTGCAGGGTCC[CG]AGCTCTGGGGGTGAACTTGCCCTA[CG]
[CG]GAGAG[CG]CCCCACTCCTTGCCTGGGG[CG]GCCT[CG]G
GTCCTGGAGG[[CG]]AGC[CG]CCTCCCAGACTCTCCCC[CG]A
GATCTGGGCTCC[CG]GAGATGTGGCTCCTTTCTGAGAAACACCC
CCAAATCTATCCCTTTTGAGGTGTCCTTACTGTCC[CG]AGAAGC
AAT[CG]CAG
SEQ ID NO: 5229
AGC[CG]C[CG]C[CG]G[CG]CCAACTTTTCCCAT[CG][CG]G
GAG[CG]AAGAGCAG[CG]GAGAGAGGGGTCCCAGAA[CG]AAGG
TGG[CG]GCA[CG]AGCTCTG[CG]CTGG[CG]GCTGTGGGGGGC
[[CG]]G[CG]CTCAGGACCCCAACTCCATCCAAGTTG[CG]C[C
G][CG]GTGGGGG[CG]GG[CG]GAGG[CG]G[CG]C[CG]GGCA
GGTGG[CG]GC[CG]CTTGCC[CG]GGCTGGGCTTGTGC[CG]AG
[CG][CG]GGTC[CG]GA[CG]GAG[CG]AGC[CG]C[CG]C[CG
][CG][CG]GGGGTGGAGCTGAGCTGAAGTCACTGG[CG]GAG[C
G]GG[CG][CG]GG[[CG]]CTGG[[CG]]GG[[CG]]A[[CG]]
[CG]GGAGGGAGGGCAGG[CG]CTGC[CG]GGACTC[CG]GG[CG
]C[CG][CG]TCC[CG][CG]GC[CG]AGCTG[CG]CTG[CG]CA
C[CG]GGTCTC[CG]GG[CG]CTGGAGG[CG][CG]C[CG]G[CG
]ACCTCCCCT[CG]GCCT[CG]CAGG[CG]CTGC[CG]C[CG]CC
TCTCCC[CG]C[CG]CCCACTCTG[CG]CCCC[CG][CG]GC[CG
][CG]GGTCC[CG]G[CG]CTGAGTC[CG][CG]CACCCTGCC[C
G][CG]GGGG[CG]GT[CG]ACCC[CG]GGCTCC[CG]GAGCAGT
[CG]ATGTGT[CG]GGAGCTTCCTATTCCTGCTTTATTGTTTCTA
TGAGTCTATGTTGCTGTTTC
SEQ ID NO: 5230
[CG]C[CG][CG]G[CG]CCAACTTTTCCCAT[CG][CG]GGAG[
CG]AAGAGCAG[CG]GAGAGAGGGGTCCCAGAA[CG]AAGGTGG[
CG]GCA[CG]AGCTCTG[CG]CTGG[CG]GCTGTGGGGGGC[[CG
]]G[[CG]]CTCAGGACCCCAACTCCATCCAAGTTG[[CG]]C[C
G][CG]GTGGGGG[CG]GG[CG]GAGG[CG]G[CG]C[CG]GGCA
GGTGG[CG]GC[CG]CTTGCC[CG]GGCTGGGCTTGTGC[CG]AG
[CG][CG]GGTC[CG]GA[CG]GAG[CG]AGC[CG]C[CG]C[CG
][CG][CG]GGGGTGGAGCTGAGCTGAAGTCACTGG[CG]GAG[C
G]GG[CG][CG]GG[[CG]]CTGG[CG]GG[CG]A[[CG]][CG]
GGAGGGAGGGCAGG[CG]CTGC[CG]GGACTC[CG]GG[CG]C[C
G][CG]TCC[CG][CG]GC[CG]AGCTG[CG]CTG[CG]CAC[CG
]GGTCTC[CG]GG[CG]CTGGAGG[CG]C[CG]C[CG]G[CG]AC
CTCCCCT[CG]GCCT[CG]CAGG[CG]CTGC[CG]C[CG]CCTCT
CCC[CG]C[CG]CCCACTCTG[CG]CCCC[CG][CG]GC[CG][C
G]GGTCC[CG]G[CG]CTGAGTC[CG][CG]CACCCTGCC[CG][
CG]GGGG[CG]GT[CG]ACCC[CG]GGCTCC[CG]GAGCAGT[CG
]ATGTGT[CG]GGAGCTTCCTATTCCTGCTTTATTGTTTCTATGA
GTCTATGTTGCTGTTTCCTT
SEQ ID NO: 5231
CAG[CG][CG]CAGCTAAAGGGTTTGGAGGTGAAAAGGAGGGCTG
GGTGGGGAGGAGAGAAAGTGAGAAGGGAGAGAAAAG[CG]G[CG]
GCTGAGCAAAG[CG]GGAGC[CG]G[CG][CG]GG[CG]GTGGGG
CCTGACC[CG]GA[CG]C[CG][CG]CACC[CG]GCTC[CG]CCC
[CG][CG]CCCAG[CG]CCC[CG]CTCACTCCCTGGC[CG][CG]
CCTGCCTT[CG][CG]CCCCTCTGTTTTCTCTCACTTACCAGCAG
CTCTGCTGACAAG[CG]AGAAAACTGACAAGTGAGAAAAGT[[CG
]]TCTGTCAG[CG]CC[CG]GGCTGGTGTCTGGGCTGTCAC[CG]
[CG]GG[CG][CG]GAGGGAGGGG[CG][CG][CG]GGCAC[CG]
C[CG]TCTGC[CG]GGCACA[CG]CTGGGCTC[CG]ACCC[CG]G
C[CG]GGCACACTCACCCC[CG]CAGGGCAGC[CG][CG]GCCAC
CAC[CG]ACCTG[CG]GAGCTG[CG]TGGGCTTC[CG]GAACCCT
CACCTCAACAAGAGCT[CG]GCTC[CG][CG][CG]CAAGTAGGA
GGGAAGGGAAATCCTTATCCTCC[CG]GGGCCAGGGCA[CG]CAG
AAGC[CG][CG]AGGCTT[CG][CG]GAGGTTGGGCCTGGAGGTC
CCCCACAGCCTCACTCT[CG]CACC[CG]CCACAGAAC[CG]GAT
CCAT
SEQ ID NO: 5232
CCAGGAGACCAGGGTAC[CG]GGT[CG][CG]TGTC[CG]C[CG]
C[CG]C[CG]CC[CG]CTGGAATCCAGGGCTGCA[CG][CG]TGA
C[CG][CG]G[CG]G[CG]G[CG]G[CG]CTGG[CG]AGGGGAAG
GGGGAGGGGG[CG]CTCCCT[CG][CG]CACCAGATTATTTTTGG
CTC[CG]CAGC[[CG]]GGGCTGCT[CG]CTGCTTGT[CG][[CG
]][CG]CTCACACACACACAGACACACA[CG]CACACACACACAT
GCACACATTTTCT[CG][CG]CTCTCTC[CG]GCTCTCCTTTGTT
TATTTTCTAATCTATATTTTTACTGGAAGATTTCCTCTTTATTCT
CTCC[CG]CCCTCCTACAAG[CG]CTCTTGCTGGC[CG]TCTGGG
TGCACACAC[CG]CTCCCT[CG]ATCACCCCAGCCCCCTTCCTGG
TCTCC[CG]AG[CG][CG]GGGTTTGAAGGTCACCTCCTTTCCAG
TCCC[CG]TG[CG]AGC[CG][CG]CTGC[CG]C[CG]CCTCCTC
CAGCCAGAGT[CG]GTGGGACTGGCTG[CG]CTGCCCTGAAGTGG
TTCTCCAAGCAG[[CG]][[CG]]GAGGGTGG[[CG]]GA[CG]G
[CG]GA[CG]GAGCCCAGGGGC[CG][CG]T[CG]GGTGGGGAAA
CC[CG]AACT[CG][CG]GAGGGGAATCCCTCCCCCTC[CG]CCC
CAGCCCCC
SEQ ID NO: 5233
CCAAACAAAGCCACAGAAG[CG]ATCAG[CG][CG]CAGCTAAAG
GGTTTGGAGGTGAAAAGGAGGGCTGGGTGGGGAGGAGAGAAAGTG
AGAAGGGAGAGAAAAG[CG]G[CG]GCTGAGCAAAG[CG]GGAGC
[CG]G[CG][CG]GG[CG]GTGGGGCCTGACC[CG]GA[CG]C[C
G][CG]CACC[CG]GCTC[CG]CCC[CG][[CG]]CCCAG[CG]C
CC[CG]CTCACTCCCTGGC[CG][CG]CCTGCCTT[CG][CG]CC
CCTCTGTTTTCTCTCACTTACCAGCAGCTCTGCTGACAAG[CG]A
GAAAACTGACAAGTGAGAAAAGT[[CG]]TCTGTCAG[CG]CC[[
CG]]GGCTGGTGTCTGGGCTGTCAC[[CG]][CG]GG[CG][CG]
GAGGGAGGGG[CG][CG][CG]GGCAC[CG]C[CG]TCTGC[CG]
GGCACA[CG]CTGGGCTC[CG]ACCC[CG]GC[CG]GGCACACTC
ACCCC[CG]CAGGGCAGC[CG][CG]GCCACCAC[CG]ACCTG[C
G]GAGCTG[CG]TGGGCTTC[CG]GAACCCTCACCTCAACAAGAG
CT[CG]GCTC[CG][CG][CG]CAAGTAGGAGGGAAGGGAAATCC
TTATCCTCC[CG]GGGCCAGGGCA[CG]CAGAAGC[CG][CG]AG
GCTT[CG][CG]GAGGTTGGGCCTGGAGGTCCCCCACAGCCTCAC
TCT[CG]C
SEQ ID NO: 5234
C[CG]GGTGCAAG[CG]ACCCCCTGCCCCTTG[CG]CCCC[CG]C
[CG]TGTGGTCCTGGGAGTG[CG]ATG[CG]TCTTAGG[CG][CG
][CG][CG]ATTCCT[CG]AAACC[CG]G[CG]CAGT[CG][CG]
ACCTCTC[CG]GCTGACTGGTC[CG]GGAGTCC[CG]GGAGCTCC
AGCAGGGCCAG[CG]TTCCCCAA[CG]GGCTGAGC[CG]CT[CG]
TCCC[CG][CG]ACCTGCATGTCCCACT[CG]GGCCC[CG][CG]
CCCCCACTTAGC[CG]CTGAAGG[CG]TCT[CG][CG]GTGACTT
TACCTTGCCTGGGGTGGAAGTCAACTTCCCAAGACCTGGTGATGA
AGAG[[CG]]AGAGATGGTAGAGCAGCCCAGTCAGCCACTTGGCC
ACCCACATGGTTCCACCCTGGGGACCC[CG]AT[CG]GGGAGGCC
CACCAGAGC[CG]C[CG]GCAGCCAAGC[CG]GCTTCCCT[CG][
CG]CTC[CG]ATCCCTCTCCTCCCTCT[CG]CC[CG]C[CG]CTC
TC[CG][CG]CCTCAGCAGCCTAGGGAACAGCAG[CG][CG]GGC
CCTGGGC[[CG]]GCTGGTCCAGCCACAC[CG]CCTGTCTC[CG]
CT[CG]CTGAGC[CG]CTGCTTCAT[CG]CACTGCAGCCTCACCC
CCCTTCCTG[CG]CC[CG][CG]CTGCCCTCAGAAACTCTCTG
SEQ ID NO: 5235
[CG][CG]C[CG]A[CG]CATG[CG]AACTTCC[CG]GTTC[CG]
GGGGAGCT[CG]GGGTGAGGGCAGC[CG]AAG[CG]AGGGGTG[C
G]G[CG]GGGGCCT[CG]G[CG]GGGGCT[CG]GATCCCATCAAC
AG[CG]CCTCTG[CG]GGTGC[CG]AGC[CG]CCCCTAATCCAGA
AGGG[CG]CTCCCAGCTGGG[CG]C[CG]GGATC[CG]GGCAAGT
TAGGCTGGTCC[CG]AGTCC[CG]AATCTCCCACCC[CG]GACCC
CCCAGACCCAGAGCTGCCC[CG][CG]GATGAGGAGGGGG[CG]T
GGCTGAGGGACA[CG]GTGTTTGTTCCCCATCCCTGAGTTC[CG]
TG[[CG]]GACCTGCCCCAGCCCCAGCACAGTCACCCTGTGGAAC
TGGCATCCAGGAGAGGTGCTC[CG]CTCTGTG[CG]CTCCTTCCT
CC[CG]GCTGTGTGCTCCCTGTCCACAGCTCCCCATCCACAGCTT
[CG]GCACTGTGGGGCTGGTGCTCCAGGAGGGAAGGCC[CG]GTT
CTTTGCATCCCCTTTC[CG]CAAC[CG]CTAGGGTCTCTGTG[CG
]GGCCCTAGAGGAA[CG]CTCACTCAT[CG][CG]CAGCTCACCA
GGGACCCCAGCTTGGCAGAAACCAGGGGCTCTCTG[CG]GGTTCT
CTCAAATGAGTCCTT
SEQ ID NO: 5236
TTCTCCCCCTACCCCCAAACAAAGCCACAGAAG[CG]ATCAG[CG
][CG]CAGCTAAAGGGTTTGGAGGTGAAAAGGAGGGCTGGGTGGG
GAGGAGAGAAAGTGAGAAGGGAGAGAAAAG[CG]G[CG]GCTGAG
CAAAG[CG]GGAGC[CG]G[CG][CG]GG[CG]GTGGGGCCTGAC
C[CG]GA[CG]C[CG][CG]CACC[CG]GCTC[CG]CCC[CG][C
G]CCCAG[CG]CCC[CG]CTCACTCCCTGGC[CG][CG]CCTGCC
TT[CG][CG]CCCCTCTGTTTTCTCTCACTTACCAGCAGCTCTGC
TGACAAG[CG]AGAAAACTGACAAGTGAGAAAAGT[[CG]]TCTG
TCAG[CG]CC[[CG]]GGCTGGTGTCTGGGCTGTCAC[[CG]][C
G]GG[CG][CG]GAGGGAGGGG[CG][CG][CG]GGCAC[CG]C[
CG]TCTGC[CG]GGCACA[CG]CTGGGCTC[CG]ACCC[CG]GC[
CG]GGCACACTCACCCC[CG]CAGGGCAGC[CG][CG]GCCACCA
C[CG]ACCTG[CG]GAGCTG[CG]TGGGCTTC[CG]GAACCCTCA
CCTCAACAAGAGCT[CG]GCTC[CG][CG][CG]CAAGTAGGAGG
GAAGGGAAATCCTTATCCTCC[CG]GGGCCAGGGCA[CG]CAGAA
GC[CG][CG]AGGCTT[CG][CG]GAGGTTGGGCCTGGAGGTCCC
CCAC
SEQ ID NO: 5237
[CG]GGCTTGGGAGC[CG]C[CG]C[CG]G[CG]CCAACTTTTCC
CAT[CG][CG]GGAG[CG]AAGAGCAG[CG]GAGAGAGGGGTCCC
AGAA[CG]AAGGTGG[CG]GCA[CG]AGCTCTG[CG]CTGG[CG]
GCTGTGGGGGGC[[CG]]G[CG]CTCAGGACCCCAACTCCATCCA
AGTTG[CG]C[CG][CG]GTGGGGG[CG]GG[CG]GAGG[CG]G[
CG]C[CG]GGCAGGTGG[CG]GC[CG]CTTGCC[CG]GGCTGGGC
TTGTGC[CG]AG[CG][CG]GGTC[CG]GA[CG]GAG[CG]AGC[
CG]C[CG]C[CG][CG][CG]GGGGTGGAGCTGAGCTGAAGTCAC
TGG[CG]GAG[CG]GG[CG][CG]GG[CG]CTGG[[CG]]GG[CG
]A[CG][CG]GGAGGGAGGGCAGG[CG]CTGC[CG]GGACTC[CG
]GG[CG]C[CG][CG]TCC[CG][CG]GC[CG]AGCTG[CG]CTG
[CG]CAC[CG]GGTCTC[CG]GG[CG]CTGGAGG[CG]C[CG]C[
CG]G[CG]ACCTCCCCT[CG]GCCT[CG]CAGG[CG]CTGC[CG]
C[CG]CCTCTCCC[CG]C[CG]CCCACTCTG[CG]CCCC[CG][C
G]GC[CG][CG]GGTCC[CG]G[CG]CTGAGTC[CG][CG]CACC
CTGCC[CG][CG]GGGG[CG]GT[CG]ACCC[CG]GGCTCC[CG]
GAGCAGT[CG]ATGTGT[CG]GGAGCTTCCTATTCCTGCTTTATT
GTTTCTATGAGTCTATG
SEQ ID NO: 5238
T[CG]GGAT[CG]G[CG]CCTCCTAGGTG[CG]GGCTGTG[CG]G
GCAGTCCTGCTCC[CG]CCCC[CG]GGGCTGAGCTGG[CG]G[CG
]T[CG]GCTTCAGAGCCT[CG]GAGC[CG]AGC[CG]AGTC[CG]
GGGAAG[CG]CTCCTTTCTCAGCTCCAGC[CG]AAGAGC[CG]CC
[CG]GCAGGGAGAGG[CG]GAGTCACTGG[CG]CC[CG]GGG[CG
]GGGTGTTGGGGAGGGGTGAGTAGGGACAGGAGGGAGGGGGTGGA
GAGTTGGGCTGCTG[CG]A[CG]CCTCC[CG]GTGGCTCTGG[CG
]GCACCAATG[CG]GGGCAC[CG]GAGCAGGTGTC[CG]ACTG[[
CG]]GTG[CG]GGCTACCACTC[CG]C[CG]GGGAACCT[CG]TC
TTGCTCCTCCCTG[CG]CTT[CG]CCTCTGGAATCTCTCCCTTAT
CTCATGC[CG][CG]GTGAAACTTTGCTCAAGTTGGTGGTGCTCT
GAGGTCTCCAGGGCTGGAGGC[CG][[CG]][CG]A[CG][CG]A
AT[CG]C[CG]ACACTGGATTCT[CG]GG[CG]TTAGTC[CG]AA
GTTTAAGTTCCCTT[CG]TTCACTCCTTTGCCCTGGAT[CG]AAC
[CG]CAGCCCCAGGA[CG]CAG[CG]GGTTCCACTGGAAA[CG]G
GGAAT[CG]GGGAGAGG[CG]GT[CG]CTGGGCTC[CG]GG[CG]
AC
SEQ ID NO: 5239
[CG]A[CG]CCTCAGCTCATTTGTTAATTAGCAGTAATTGCC[CG
]GGTCAGTGACACCTCCTACTTGAGCCTCTTTCCCTGTCCATAAA
ATGCACTAATACTGGGGTGGGTGGGATTGGGAGGTGGGTCCTGGA
GCTCCATCCAATCAGTGGCACTGGTGTAGGAAC[CG]CC[CG]AT
CAGG[CG][CG]CAGTTGGAGAGGAGGG[CG]TGGCTTC[CG]GC
ATTTGG[CG]GGGTCTTTGTCTCT[CG]CTCC[CG]CCAGAGCTT
GGGAT[CG]GTCTTCACTGTTC[CG][CG]TCCTCTACCTGGGAA
CCAC[CG]ACCCC[CG]CC[CG]G[CG]ACTTTGTCACAGACTCT
GTTGCCCTGTGATCTGCAGGTCCTGGGAGA[CG]CACAGCCAAGA
TGCCAGGGCACCCTGGAAGCTGTGAAGTGGTG[CG]TATG[CG]G
GGTTGGGCATCCCTTGAGG[CG]AGAG[CG]GGCTGTGAAACCTG
CAGGAC[CG]GCCTCCCCACAGTC[CG]CTCC[CG]GGTC[CG]C
[CG]ACCTCAGTCCTCTCTGG[CG]CAGCT[CG]GCCCCAGG[CG
]TCTCTGGC[CG]CAAGATGG[CG]GCTGGGCC[CG][CG]GC[C
G]GGACCCCCAG[CG]TCT[CG]C[CG][CG]TCCCTGCTGGG[C
G]CCCTGTC
SEQ ID NO: 5240
CCTTTGGGAAACCTTAAAAGCCTGGACTTGGAT[CG]CATCCCTC
CTTTCTT[CG]AAACTCTCCATGGCTTCTAG[CG]TCTTCACAG[
CG]AATACACAGCCCCCAGCCTGCTCTTCCAGGAGAAGCTT[CG]
CCTCACA[CG]TTGTTCCCTACAGG[CG]CCTGTGGACCCCAGGT
TCCATCCTCC[[CG]]GGTCTGTCCTCCAGGCCATAGCC[CG][C
G]C[CG]GTCCCTGTGCCTGT[CG]CTCTCCCCAC[CG]CATCCC
ACAGGTGTCAGAAACAAGGACCTCTCC[CG][CG]AA[CG]CCTC
AGTGTCC[CG]A[CG]C[CG]GGTC[CG]GGCTGCAGACCTGTGA
ACAGT[CG]C[CG]CTCTCT[CG]CTGCTTCAGGATT[CG]GGTT
AGGATGAGGTGACCTGAGGGCAGGGAAGGCACAATTACCTGAGC[
CG]GGAGCCTCAG[CG][CG]GC[CG]C[CG]CCATCC[CG]AGT
A[CG][CG]GGGAAAGCACTGC[CG]GGAG[CG]G[CG]GG[[CG
]][CG]TTA[CG]GGGCCTAAGATCTGCCTCTGTGCAGCAAGAAG
GACTCTTCACCTTCTGGGTTCAGACAC[[CG]][CG]GTT[CG]G
ACCCATAGCTCCAG[CG]CCTCTCACCTCACAAAC[CG]CAGAAA
CACACCCAACATTAAC
SEQ ID NO: 5241
G[[CG]]CCCTGTTTCACCAGGCCCAGTCACTCCAGCTCCAGCAG
CACTGAGAGCTCA[CG]AA[CG]CCAAGGG[CG]AGAG[CG]AGG
TGGGGGAGGG[CG]GC[CG]GAAATG[CG][CG][CG][CG]GCT
CTCTGGGAAATGGAGTTAGGCT[CG][CG]C[CG]G[CG]CAGTG
T[CG]GCTGC[CG]GTGC[[CG]][CG]GCCTTTGTCT[CG]CAG
TCAGGAGGGTGAGCTAGGC[CG]G[CG]AGGAGGGGGAGGGGAGG
CCAGGC[CG]GGC[CG]GGC[CG]GGC[CG]GGTG[CG]GGGGGT
C[CG]GGGATCTTCCTGAGGCCCTGG[CG]GGG[CG]AGTTTCCA
GCAG[[CG]][CG][CG]TCTGTGTGGAGTC[CG]TTTTGCTGCC
[CG]GGGCCTGGGGAAGGC[CG]TTT[CG]GGGCTGG[CG]GGGG
CAGGCTTTG[CG]GGGCATCCCTAGTCTGAGAGGAGGG[CG]GGG
CCCAA[CG]CCCAGCTGGACAGGAGCTGCTC[CG]A[CG]GCCCC
TGAGGGAA[CG][CG][CG]CCC[CG]CCCCTGGCCCCACCTCTG
CCCCACAC[CG]GGCACTGGGC[CG]CCACCTTTGTTGATGGAAG
AGAGAAACTGAGGCATAGTGCCCAGGGCCAGGGGAC[CG]CAACC
ACC[CG]GCCCTTGTCACTGTAG[CG]TTAAGGCT
SEQ ID NO: 5242
CTGGGGAGCCAC[CG]C[CG]G[CG]CCAACTTTTGCCATCC[CG
]GGAGCCATAG[CG]GCAGAGAGGGGGTCC[CG]GACC[CG]AGG
TGGCAG[[CG]]AGGGGCTCTGCTTTGGCAGCTGT[CG]GGGCTG
GAGCTCAGGACCCCAACTCCAGCCAAGT[CG]GGC[CG][CG]G[
CG]GGGCAGG[CG]TAGGCTG[CG]CAGGCAGGGGTGGC[CG][C
G]GGTGCTGAGCCAGT[CG]C[CG]C[CG][CG]CAGG[CG]GG[
CG]CTGGAGTCTCAGCTACCTGG[CG][CG]AC[CG]CCAGCAGC
ACCCAG[CG][CG]GGGC[CG]GGAGCTGCTGGGGGCCCAGGCTC
[[CG]]CTCTCCCCAC[CG]CTCTGCAC[CG]CTGC[CG]GCTG[
CG]GACAGACC[CG]ATG[CG]CCACCACCAC[CG]CAGTTGCCA
[CG]ACCCCCATGGAAT[CG]CTGG[CG]CCTC[CG]CTC[CG]G
TTCTCTAACC[CG]G[CG]CACTCTGGGATCCCAAAGCTTGC[CG
]TGGGTTGGAGGCTTCCTACTCTTTGTG[CG]TTGAGGCTTTGAC
CTGACCCAGAG[CG]CAGCTTATGCCCTGGCTTGGGCAGAAAATA
ATATTAATTACTGATCCTTTGTGCTCC[CG]GTCCTGGCTTCCTA
AAGCACTCCTCTCTCATTCAGCACC
SEQ ID NO: 5243
TCTGTCTCTACTGAGAA[CG]CAG[[CG]][[CG]]TCAGGGC[C
G]AGCTCTTCACTGGCCTGCTC[CG][CG]CTCTTCAATGCCAG[
CG]CCAGG[CG]CTCACCCTGCAGAG[CG]TCC[CG]CCTCTCAA
AGAGGGGTGTGACC[CG][CG]AGTTTAGATAGGAGGTTCCTGC[
CG]TGGGGAACACCC[CG]C[CG]CCCT[CG]GAGCTTTTTCTGT
GG[CG]CAGCTTCTC[CG]CC[CG]AGC[CG][CG][CG][CG]G
AGCTGC[CG]GGGGCTCCTTAGCACC[CG]GG[CG]C[CG]GGGC
CCT[CG]CCCTTC[CG]CAGCCTTCACTCCAGCCCTCTGCTCC[C
G]CA[CG]CCATGAAGT[CG]C[CG]TTCTAC[CG]CTGCCAGAA
CACCACCTCTGTGGAAAAAGGCAACT[CG]G[CG]GTGATGGG[C
G]GGGTGCTCTTCAGCAC[CG]GCCTCCTGGGCAACCTGCTGGCC
CTGGGGCTGCTGG[CG][CG]CT[CG]GGGCTGGGGTGGTGCT[C
G][CG]G[CG]TCCACTG[CG]CC[CG]CTGCCCT[CG]GTCTTC
TACATGCTGGTGTGTGGCCTGA[CG]GTCAC[CG]ACTTGCTGGG
CAAGTGCCTCCTAAGCC[CG]GTGGTGCTGGCTGCCTA[CG]CTC
AGAAC[CG]GAGTCTG[CG]GGTGCTTG[CG]CC[CG]C
SEQ ID NO: 5244
GTGGGGATTTTGTCTGCTTGTTCACTGCTGTGTGCCCAGGGCCCA
[CG]ACAGTGCC[CG]ATACAGCAGG[CG]CTCAATAAGTGG[[C
G]]AATGAAAGACAGGGCAAGG[CG]GAGAGAGAAGAAACAGAAA
GGGAAAGAGAAAGCC[CG]GGC[CG]CCAGAG[CG]CTTAATCAC
A[[CG]]TACATCCTAC[CG]GGCCCCTCTCCAGCTGGCTCAGGC
TCCACACTGGTCCTCCAGCTCCCTTTTCTCAG[CG]ATGGACTCA
CAGCCCCACC[CG]GAG[CG]CTGGAG[CG][CG]GA[CG][CG]
GTCACTG[CG][CG]TG[CG]CCTCAC[CG][[CG]]CTGGCACC
C[CG]GCCTGGCAGCCTTTGGGGACCTGAACCAGCTG[CG]CCTG
[CG]CAGGTGGAA[CG]GGTGGAA[CG]GGTGGGGGAG[CG]GAC
AGT[CG]AA[CG]GCCTGAGAGGGCTCAGCTGGTC[CG]GGTGGG
ATTCTGAAGGCCAG[CG]GAGGTGGGCTTACTAGGGAAAGGGG[C
G]CAGCAGTAACTACC[CG]CAACTGAG[CG]G[CG]GGATCTG[
CG]GC[CG]CC[CG]GGGCCCT[CG]GCCAACATCCCAGCATCCT
CTG[[CG]]C[CG][CG][[CG]]GCCC[CG]GACTCCATTTCCC
AG[CG]GCCCCTG[CG]GCCTGCCCTAG
SEQ ID NO: 5245
[CG][CG]CCTC[CG]GCAGTCTCAGATCC[CG]CTCCCAGGTCC
CTC[CG]CCTGGCATCCTCTGCC[CG]CC[CG]GTCACTG[CG]C
TGAGCAGGCAGG[CG]GG[CG]GGC[CG]G[CG]CCTGTCACC[C
G]CAGCTGGAG[CG]CC[CG]TTCCCTGCC[CG]CCCCATCTGCA
GGG[CG]CCT[CG]GGCACTG[CG]TC[CG]GCCC[CG][CG]AG
G[CG]GC[CG]GGATGAGAAGCAGC[CG]GAGTTCCT[CG]GGGG
CAGCAGTGACAGAGGAG[CG]A[CG][CG]CTCT[CG]CCTGGAT
TCTTTTCCTTTTCTGCCCAGG[CG]AGACCCACTTATTTCCTGGG
GT[[CG]][CG]TTGGAGAGGGCTTTCA[CG]CC[CG]GGGTG[C
G]GAAAAGAAGCCAAATCCACCTTCCTCCACTGTTGGCCACCCTC
CTGCAGGCTCCCCCAG[CG]C[CG]ACTTCATTTTCTCTCTTCTC
T[CG]CTACTTCCTCTCTGCCTTTCTTT[CG]TTATTTTTCCAC[
CG]AGT[CG]CCAC[CG]C[CG]CTTGCTTCCT[CG]GAGGAGCA
A[CG][CG]ACTGGCCAGCAAAGGGTGGCTCTGCTC[[CG]]AG[
CG]CCAAAGTTCTCCC[CG]CCTCAGC[CG]G[CG]CCTCCCTGT
TGCTGAGCCCTGG[CG]CCTGCCTGT[CG]CTTGGCT
SEQ ID NO: 5246
ACTCATAAAAGATGTAAGAGGAGGAGAAAGTTGGCAAGAAGTGGA
TGCTTTCATCTGCAGAGAAAGGCCCCTGAGCCCTAAAAAAACTGC
CCTCCTCCCCACTCCCCCCTCCTCCCCC[CG]ACACACAAAAAAG
TTCACCCACTACACCTGCCTTCCCCAGATGGGCTCCCTG[CG]CA
A[CG]CCTCCT[CG]TCCTC[CG]AGATTTTCCAATGGTGG[CG]
CAAGCTCCTCCCT[CG]CC[CG]AGCTGGG[CG]C[CG]TCCTAG
AGCCAAG[CG]CC[CG]CTAGAGC[CG]AGACTAGGGGG[CG]GT
GAGGAGTGGGACC[CG]CT[CG][CG]GCCATTGGTTGTG[CG]G
CCAGGAGGGG[CG]GAGGGA[CG]A[CG][CG][CG]GGCTGTG[
CG]GGGC[CG]GCAGCC[CG]GATCCACTCC[CG]CTG[CG]CCT
GCTGTC[CG]C[CG]TG[CG]CCCAGACTG[CG][CG]C[CG][C
G]C[CG]CTG[CG]CCCAACATTCC[CG]AGGA[CG]GCTT[CG]
[CG]GG[CG][CG]TAT[CG]TCCAGAC[CG]GAGCAC[CG]CCC
CAC[CG]CTAG[CG]CAGGAGACCTGC[CG]GGGAAGT[CG][[C
G]]TGTCCTGACCTGCAGGTCAGTGAGGGAAACTTGCAGGGTCC[
CG]AGCTCTGGGGGTGAACTTGCCCTA[CG]
SEQ ID NO: 5247
AGAGTCTGTCTCTACTGAGAA[CG]CAG[[CG]][[CG]]TCAGG
GC[CG]AGCTCTTCACTGGCCTGCTC[CG][CG]CTCTTCAATGC
CAG[CG]CCAGG[CG]CTCACCCTGCAGAG[[CG]]TCC[CG]CC
TCTCAAAGAGGGGTGTGACC[CG][CG]AGTTTAGATAGGAGGTT
CCTGC[CG]TGGGGAACACCC[CG]C[CG]CCCT[CG]GAGCTTT
TTCTGTGG[CG]CAGCTTCTC[CG]CC[CG]AGC[CG][CG][CG
][CG]GAGCTGC[CG]GGGGCTCCTTAGCACC[CG]GG[CG]C[C
G]GGGCCCT[CG]CCCTTC[CG]CAGCCTTCACTCCAGCCCTCTG
CTCC[CG]CA[CG]CCATGAAGT[CG]C[CG]TTCTAC[CG]CTG
CCAGAACACCACCTCTGTGGAAAAAGGCAACT[CG]G[CG]GTGA
TGGG[CG]GGGTGCTCTTCAGCAC[CG]GCCTCCTGGGCAACCTG
CTGGCCCTGGGGCTGCTGG[CG][CG]CT[CG]GGGCTGGGGTGG
TGCT[CG][CG]G[CG]TCCACTG[CG]CC[CG]CTGCCCT[CG]
GTCTTCTACATGCTGGTGTGTGGCCTGA[CG]GTCAC[CG]ACTT
GCTGGGCAAGTGCCTCCTAAGCC[CG]GTGGTGCTGGCTGCCTA[
CG]CTCAGAAC[CG]GAGTCTG[CG]GGTGCTTG[CG]C
SEQ ID NO: 5248
TC[[CG]]GCACAGCAATTAACATTGGTCCAAA[[CG]]GTGTCA
GTGAACTTTAGCTGCAAAGAAACTACCTCATTTAAAATTTAAGCA
GACCACAGGGAGTAGCATTGGAGGAAAGAGAGGAGATTTTCTCCT
TCAACATTTTGAGCATACTGGAATGCCAACCCCCTAGGTAGGTGC
CAGGGCCACCACAGGAACCTGACT[CG]CAGGAGT[CG]TCCTC[
CG]TCTCTA[CG][CG]AAG[CG]CCCCCT[CG]AGGTGGGCAGG
GGGTGG[CG]G[CG]G[CG]A[CG]GTGG[CG]GAGC[CG]CAGA
G[CG]AGCTAGAGAG[CG]AGAG[CG]GTGAGACTCTG[CG]GA[
CG]TCTTCC[CG]CC[CG]C[CG][CG]CTC[CG]CCCCACCCAG
CCTC[CG]CAGCCT[CG]GGC[CG]GAT[CG]CC[CG]G[CG]GG
GAAGATG[CG]CCTCAAGAACCAGGTAGAAG[CG]CCT[CG]G[C
G]CAGGCCC[CG]CACCCC[CG]ACTCTGCC[CG]CCCTCTGTTA
[CG]GACACC[CG]CTGGGCCA[CG]TGGT[CG][CG]ACTGGCT
TCTCCCAG[CG]GCCAGCCTGGCCACCC[CG]ACTCCCAGGGAGG
GGGAGAGGGCCCTTGCAAGAGGATCCTGCCCC[CG][CG]CTGCC
CAGACCTGAGGGCTCCTGG[CG]AC
SEQ ID NO: 5249
G[CG]TTGGAGAGGGCTTTCA[CG]CC[CG]GGGTG[CG]GAAAA
GAAGCCAAATCCACCTTCCTCCACTGTTGGCCACCCTCCTGCAGG
CTCCCCCAG[CG]C[CG]ACTTCATTTTCTCTCTTCTCT[CG]CT
ACTTCCTCTCTGCCTTTCTTT[CG]TTATTTTTCCAC[CG]AGT[
CG]CCAC[CG]C[CG]CTTGCTTCCT[CG]GAGGAGCAA[CG][C
G]ACTGGCCAGCAAAGGGTGGCTCTGCTC[CG]AG[[CG]]CCAA
AGTTCTCCC[CG]CCTCAGC[CG]G[CG]CCTCCCTGTTGCTGAG
CCCTGG[CG]CCTGCCTGT[CG]CTTGGCTG[CG]CTAAA[[CG]
]CCCACTGTTGGTGAGATTCC[CG]AGTGGCACATCC[CG][CG]
CCCCTGGAAAGTCCTCTCCCCTCAAAGGCTGGG[CG]TCATAGTT
TGCAAAATTCCCTAAAACCTAAGAAGGAAAATAGGACTATGAGC[
CG]GTGAGAATTCTGAATTCAGAGT[CG]CACCTGAGGGATCTGA
AATT[CG]GTGGTTCACTGAAATAGGTTCAAAGAGGCTGTGACTT
AA[CG]AGCTTCTGGATGTGT[CG]CTTTTAAGGTTTTTCTAGCT
AAGGGTATTAAAGTAAGAATTATTTACACATTTTTATCTC
SEQ ID NO: 5250
AGAGGGCTTTCA[CG]CC[CG]GGGTG[CG]GAAAAGAAGCCAAA
TCCACCTTCCTCCACTGTTGGCCACCCTCCTGCAGGCTCCCCCAG
[CG]C[CG]ACTTCATTTTCTCTCTTCTCT[CG]CTACTTCCTCT
CTGCCTTTCTTT[CG]TTATTTTTCCAC[CG]AGT[CG]CCAC[C
G]C[CG]CTTGCTTCCT[CG]GAGGAGCAA[CG][CG]ACTGGCC
AGCAAAGGGTGGCTCTGCTC[CG]AG[[CG]]CCAAAGTTCTCCC
[CG]CCTCAGC[CG]G[CG]CCTCCCTGTTGCTGAGCCCTGG[CG
]CCTGCCTGT[CG]CTTGGCTG[[CG]]CTAAA[CG]CCCACTGT
TGGTGAGATTCC[CG]AGTGGCACATCC[CG][CG]CCCCTGGAA
AGTCCTCTCCCCTCAAAGGCTGGG[CG]TCATAGTTTGCAAAATT
CCCTAAAACCTAAGAAGGAAAATAGGACTATGAGC[CG]GTGAGA
ATTCTGAATTCAGAGT[CG]CACCTGAGGGATCTGAAATT[CG]G
TGGTTCACTGAAATAGGTTCAAAGAGGCTGTGACTTAA[[CG]]A
GCTTCTGGATGTGT[CG]CTTTTAAGGTTTTTCTAGCTAAGGGTA
TTAAAGTAAGAATTATTTACACATTTTTATCTCCTCAGCT
SEQ ID NO: 5251
CAGCAGAAGC[CG]CAGCTTCAGAGGCAGC[CG]GAGAGACCT[C
G]GAGCAGAGAAGG[CG]C[CG]C[CG]ACCCT[CG][CG]GCTG
CCTGGCC[CG][CG]GCTCCTACAAAGG[CG]GGCTAGC[CG]CC
[CG]CCCTCTCCCTTGCCTTCCTCCCCTTCTTTTCTGACTTTCCC
TCTTTCCCTTAAT[CG]CCTGCTTCTTCCTC[CG]GGTGGACTTA
[CG]GCCACCTTGCTCCTC[CG][CG]CTTCACCTCAT[CG]CCC
CCTCTTTCTTTCTTCTGCCTCTCTCTCTG[CG]CCCCCTTCTCTC
[CG]TGTCA[CG]CTCCCTCCTGGTTCTG[CG][CG]TCTACAAA
CTTTTGAGCAGAACA[CG]AGCCT[CG]GCAAA[CG]AGTCC[CG
]CAGCTCCTCCTGCTGCTCC[[CG]]CTGGTTCCTG[CG]GCTTC
TGCTCAGACACCAA[CG]CCAGA[CG]G[CG]ATGCCTCT[CG]G
GTGGTGACTCCAG[CG]CAGGAACTTGAAGAAG[CG]CTTTGCC[
CG]C[CG]TCCTACCTGGCAGCTCTCCTGGCAG[CG]GGAGGAGT
TGAAGGGTAAGGGAGGGAAAATCTTACCAAAG[CG]AC[CG]GCT
CACT[[CG]]ACTGCTGATTCTTT[CG]CTTGGCAT[CG][CG]T
CAGGGGAGTTAGCTTTCCT
SEQ ID NO: 5252
TCCTAGTCTGGGACATACTTGTACTAAACATATTTATATTAAAAA
CAATGTTTTAACATACTACTCTTGGACACTGTATAAAA[CG]GTT
G[[CG]]TGTCTGGAATGC[CG]T[CG]TTTTGCCC[[CG]][CG
]GCCCCAT[CG]TACATG[CG]CATCCC[CG]CAGC[CG]CCAC[
CG]TCTCCACTTTC[CG]CAGCAG[CG]TCCCTGA[CG]CTG[CG
][CG]ACC[CG]TTGCCAAGG[CG]ACTGGAAC[CG][CG]GCC[
CG]AGGTAACTGGAGGGCA[CG]G[CG]GGGG[[CG]]GGG[CG]
CTCATCCCAGG[CG]GCTTCTGATTGGCCT[CG]GC[CG]CCT[C
G]TG[CG]TCACAGCCC[CG]CCCCTGCC[CG]GGAGTCC[CG]C
AG[CG]GTGACTTGTCAC[CG]A[CG]CC[CG]G[CG]TGATCCA
G[CG]GACCAATGG[CG]GC[CG]CC[CG][CG]G[CG][CG]CA
GGGTG[CG]GGGATGGGGTC[CG]CC[CG][CG]G[CG]TTGGG[
CG][CG]CT[CG]CCAGCCCAGGGGT[CG]CCATGAC[CG]AGTG
GCCCAGGCC[CG]AG[CG]AAGCC[CG][CG][CG][CG]GTGAG
TC[CG]C[CG][CG]GCCCATC[CG]TCCCTC[CG]CC[CG]CCA
GAG[CG]TCCAT[CG]GGA[CG]CCCACC[CG]GGAGGGTCT[CG
]G[CG]C[CG][CG]T[CG]G[CG]GGAGCTGGCC[CG]GGA
SEQ ID NO: 5253
TTC[CG]TCAC[CG]GGGAAAGGAGGTACACACAGT[CG][CG][
CG][CG]CA[CG]GACACACACACACA[CG]CA[CG]CA[CG]CA
CACACAC[CG]GTGG[CG]AGTT[CG]AGCCC[CG][CG]GCCCC
TGTC[CG]CC[CG][CG]TG[CG]CCCCT[CG]ACACAGCT[CG]
CCTCC[CG]CCCCCTGATTCCTGCTGCTGC[CG]CCCAGAGGAGA
AAGGAACCTCTGCCT[CG]AATTTCCCCACTG[CG]C[CG]GG[C
G]CTG[CG]GAGAG[CG]G[CG]AGGGTGGG[CG][CG]AGG[CG
]GAGAA[CG][CG]ATGAATGAGTTCTCCCCT[CG]CCT[CG]GA
GTTGTCTGAGTTGG[CG]G[CG]CTG[CG]CCCAGGCTTC[CG]G
CTCTCAG[CG]CCCCA[CG][CG][CG][CG]TGGCTCCC[CG]G
GCTGCCACCCA[CG]CC[CG][CG]GC[CG]GGGC[CG]AGCCAG
CCA[CG]CAGGGCAGC[CG]AGGCTC[CG]GAGCTCCTGTCC[CG
]GCCCCAGTC[CG]GGTAAAAGGAGGGTTGTCCCCAG[CG]GAGG
[CG]CACAGC[CG][CG][CG]TTCTCCCTGCACTCTCTT[CG][
CG]GTCCCATCTGTTCCCCATGG[[CG]]TCTCATC[CG]CAAAC
C[CG]GATCCAGGCTTACCTGGAGAAGAACAAGAT[CG]GTCCCC
TGTTTGAGGTAAGG[CG]CT
SEQ ID NO: 5254
GAACCAGCCATGGTCC[[CG]]GGCTAATGCCCAGGGATAAGCAC
AGGGATAGGGATAGAGATAGGGATTGGGATTGGACTCCAGCTCCA
AGAGAAAGCACCT[CG]GGTCTATT[CG]TATTCTCCCCCTACCC
CCAAACAAAGCCACAGAAG[CG]ATCAG[CG][CG]CAGCTAAAG
GGTTTGGAGGTGAAAAGGAGGGCTGGGTGGGGAGGAGAGAAAGTG
AGAAGGGAGAGAAAAG[CG]G[CG]GCTGAGCAAAG[CG]GGAGC
[CG]G[CG][CG]GG[CG]GTGGGGCCTGACC[CG]GA[CG]C[C
G][CG]CACC[CG]GCTC[CG]CCC[CG][CG]CCCAG[CG]CCC
[CG]CTCACTCCCTGGC[CG][CG]CCTGCCTT[CG][CG]CCCC
TCTGTTTTCTCTCACTTACCAGCAGCTCTGCTGACAAG[CG]AGA
AAACTGACAAGTGAGAAAAGT[[CG]]TCTGTCAG[CG]CC[[CG
]]GGCTGGTGTCTGGGCTGTCAC[[CG]][CG]GG[CG][CG]GA
GGGAGGGG[CG][CG][CG]GGCAC[CG]C[CG]TCTGC[CG]GG
CACA[CG]CTGGGCTC[CG]ACCC[CG]GC[CG]GGCACACTCAC
CCC[CG]CAGGGCAGC[CG][CG]GCCACCAC[CG]ACCTG[CG]
GAGCTG[CG]TGGGCTTC[CG]GAACCCTCACCTCAA
SEQ ID NO: 5255
ACCAGCCATGGTCC[[CG]]GGCTAATGCCCAGGGATAAGCACAG
GGATAGGGATAGAGATAGGGATTGGGATTGGACTCCAGCTCCAAG
AGAAAGCACCT[CG]GGTCTATT[CG]TATTCTCCCCCTACCCCC
AAACAAAGCCACAGAAG[CG]ATCAG[CG][CG]CAGCTAAAGGG
TTTGGAGGTGAAAAGGAGGGCTGGGTGGGGAGGAGAGAAAGTGAG
AAGGGAGAGAAAAG[CG]G[CG]GCTGAGCAAAG[CG]GGAGC[C
G]G[CG][CG]GG[CG]GTGGGGCCTGACC[CG]GA[CG]C[CG]
[CG]CACC[CG]GCTC[CG]CCC[CG][CG]CCCAG[CG]CCC[C
G]CTCACTCCCTGGC[CG][CG]CCTGCCTT[CG][CG]CCCCTC
TGTTTTCTCTCACTTACCAGCAGCTCTGCTGACAAG[CG]AGAAA
ACTGACAAGTGAGAAAAGT[[CG]]TCTGTCAG[CG]CC[[CG]]
GGCTGGTGTCTGGGCTGTCAC[[CG]][CG]GG[CG][CG]GAGG
GAGGGG[CG][CG][CG]GGCAC[CG]C[CG]TCTGC[CG]GGCA
CA[CG]CTGGGCTC[CG]ACCC[CG]GC[CG]GGCACACTCACCC
C[CG]CAGGGCAGC[CG][CG]GCCACCAC[CG]ACCTG[CG]GA
GCTG[CG]TGGGCTTC[CG]GAACCCTCACCTCAACA
SEQ ID NO: 5256
GCCTG[CG]TCCAGACCCCCTCC[CG]GGTGGGCTCCTC[CG]AG
GACCTC[CG]CAGC[CG][CG]GG[CG]AGCTGGGTGCCTG[CG]
AGT[CG]C[CG]C[CG]CAGTCTGAGCCTCTGGTGCCCCTTAG[C
G]TTGGCTCT[CG]GAGTTCTGAGAAGGGAAAGGAGACAGACACT
CTGGGAAAATCTGGGGTCACCT[CG]ATTC[[CG]]GCTCCTA[C
G]CTGGATGC[CG]TGGGCAAGCAT[CG]GTCTCCTTTGATCTGA
AGATCCTGCCCACTC[CG]CCCCTTGCCCCTGCCAGACC[CG][C
G]GGAGCAGCAGGTGG[CG]TGGGTGCCAGA[[CG]]CTGC[CG]
GTG[CG]CAC[CG]AGTGCAG[CG]CTGCCC[CG]GCT[CG]CCC
[CG]GGGGT[CG][CG]TGGGACAG[CG]GTTTG[CG]GTGT[CG
]CCCTCTCTG[CG]GTGCTTTCCAAGGACCCTCATGCCC[CG]CC
[[CG]]GGTGCACATTCACCACATGGGTCTTACTAGGTGACCTCT
TTCTAAGTAAAATGCATTGAGAAACCAAAGGGATGGGGCATC[CG
]TATCCATTTTCCTTTAAGGAG[CG]CTGTGGGTGTTGGGGATG[
CG]GGAGAAGTAGGTGTTTTTTAAAGAGAAAATTGCAAAACCTCT
TGGGCAGGATT
SEQ ID NO: 5257
CTCT[CG]GAGTTCTGAGAAGGGAAAGGAGACAGACACTCTGGGA
AAATCTGGGGTCACCT[CG]ATTC[CG]GCTCCTA[CG]CTGGAT
GC[CG]TGGGCAAGCAT[CG]GTCTCCTTTGATCTGAAGATCCTG
CCCACTC[CG]CCCCTTGCCCCTGCCAGACC[CG][CG]GGAGCA
GCAGGTGG[CG]TGGGTGCCAGA[CG]CTGC[CG]GTG[CG]CAC
[CG]AGTGCAG[CG]CTGCCC[CG]GCT[CG]CCC[CG]GGGGT[
CG][CG]TGGGACAG[CG]GTTTG[CG]GTGT[CG]CCCTCTCTG
[CG]GTGCTTTCCAAGGACCCTCATGCCC[CG]CC[CG]GGTGCA
CATTCACCACATGGGTCTTACTAGGTGACCTCTTTCTAAGTAAAA
TGCATTGAGAAACCAAAGGGATGGGGCATC[CG]TATCCATTTTC
CTTTAAGGAG[CG]CTGTGGGTGTTGGGGATG[CG]GGAGAAGTA
GGTGTTTTTTAAAGAGAAAATTGCAAAACCTCTTGGGCAGGATT[
CG]ACCTACTAGCCTCTTCTGCTGCATAATAAGGTACTGTATACA
CTAAATTTTACCCCTAAAAATTTTCAGTTCTTACCAACTATAGGT
AATGATCATCCAAAAGC[CG][CG]TCCTGTTTG
SEQ ID NO: 5258
T[CG]CATGGC[CG]AGGA[CG]CTTT[CG]CTG[CG]AGTTTGG
GGT[CG]AGGGGCAGTTCCCTCC[CG]GAGTCATTAACTT[CG]T
CTCCT[CG]TGCTCAGGGACCAGCAACTTGGTGCTG[CG]GG[CG
]CCAGAAAGAAAAGGGTAG[CG]CCT[CG][CG]GAG[CG][CG]
[CG]GGGGAAGAGGGACTG[CG]GCAG[CG]GGA[CG][CG]AGG
G[CG]GGAGGGG[CG]CAGCAG[CG]GGGAGC[CG]GAG[CG]CA
G[CG]GAGGGGAG[CG]CTGGGGGG[CG]GGGAG[CG]CT[CG]G
GCAGCCACCCTGTCCC[CG]TCTGGAGCCC[CG][CG]CTG[CG]
TCTAGGAGGG[CG]CAACA[CG]CAGTCCC[CG][CG]GGGGCCA
GAGCT[CG]GAGCCCCCTAGTGCATGCCCCCTCTCCT[CG][CG]
CCCTGC[CG]AGGCCT[CG]GCCCTGCCTGC[CG]TGCCCTGGGC
CTGGTTGTGCC[CG]GGGGTCCC[CG][CG]GGCAGGG[CG][CG
]GGGCAGGCAGGG[CG][CG][CG][CG]C[CG]A[CG]CTCTTT
TGTCTGATAACTAATTTGAGTTAATG[CG]ATCTTTATGTAAAGC
TAACAG[CG]GATAATTGTCTATTTTCT[CG]CCAACAGTCTCCA
TCACAATCACTTATCTGGAAACCTG[CG]GTTGGATTAAT[CG]T
TA
SEQ ID NO: 5259
TGTGGGGGGCAGG[CG]CTCAGGACCCCAATTCCCTCCAAGTTGG
GC[[CG]][CG]GTGGGGG[CG]GGTGGAGGTGG[CG]C[CG]GG
CAGCTGG[CG]GC[CG]CT[CG]CTGGGGCTGGGTTTGTGC[CG]
AG[CG][CG]AGTCTGGAAGGAG[CG]AGC[CG]CAGC[CG][CG
][CG]GGGGTGGAGC[CG]AACTGAAGTCACTGGCTGAGCAGGCA
[CG]GG[CG]CTGG[CG]GGCA[CG][CG]GGAAGGAGGG[CG]G
C[CG]ATGCCAGGTCTC[CG]GG[CG]CTGGAGG[CG]C[CG]C[
CG]G[CG]ACCCCCCCCTAGGCCT[CG]CAGG[CG]CTGCCTC[C
G]CCTATCCC[[CG]]CTGACCACTCTG[CG]CCCC[CG]CAGC[
CG][CG]GGTCTCCCTGCCTAGTC[CG][CG]CACCCTGCC[CG]
[CG]GGGG[CG]GT[CG]ACC[CG]GGCTCCTGGAGGGTGGATAT
GT[CG]GAGTTGGGAAGGGGCTTTTCTTTGCCATCTGATTCCCAA
TGACTGGACACCTCTACCTGGCTTTTCACTCAGGCTC[CG]TGTT
CTGGCCTGTGGGAAACCCTAGAAAGGTAGCCCTCAAAAATAATGT
TGGATCCTTTGGGCCTATGTACACACAACATGCTCAAAAGATGAT
CTGAGGCAACAATTATCACTCTCTA
SEQ ID NO: 5260
GAAACCCCATTGCAGTTCCAG[[CG]][CG]GCTTCTTCCCAGAG
CAGC[CG]C[CG]C[CG]C[CG]C[CG][CG]CTCCTCACACCTG
CATTGCCAGCAGCAGCAACAGAGCCAGGACAAGC[[CG]]TGCC[
CG]CCCTT[CG][CG]CCCCTCC[CG]CACCCTCACCACCACC[C
G]CACCT[CG][CG]CACCAGCAGC[CG]GCCAG[CG]G[CG]GC
AGCAGCCCATGCCTC[CG]GTGCAACAGCTG[CG]CCTCCTC[CG
]GTGCCC[CG]G[CG]G[CG]GGGG[CG]GGAGATAACCTGTCCC
TGCTGCTC[CG]CACCTCCT[CG]CC[CG]G[CG]G[CG]CCTTC
[CG]GACC[CG]CACCTCCT[CG]C[CG]CTGT[CG]GGCT[CG]
TCCTGCTGCTGCTGCTGCTGCT[CG]T[CG][CG]C[CG]GGGCA
GCCAGCTCAATGTGAG[CG]AGCTGA[CG]C[CG]TCCAGCCATG
CCAGTG[CG]CTC[CG]GCAGCAGTA[CG][CG]CAGCAGTC[CG
][CG]CAGCAGT[CG]G[CG]TC[CG]CCTCCCAGTACCACCAGT
GCCACAGCCTGCAGCC[CG]C[CG]CCAGCCCCA[CG]GGCAGCC
T[CG]GCAGTCTGGGCTC[CG]GGCCCC[CG]CTCT[CG]CACCA
CCACCACCACC[CG]CACC[CG]G[CG]CACCACCAGCACCACCA
GCCCCAGG
SEQ ID NO: 5261
GG[CG]GGGCACAGGA[CG]GTAGTCTAAGAGTGTT[CG]CATGG
C[CG]AGGA[CG]CTTT[CG]CTG[CG]AGTTTGGGGT[CG]AGG
GGCAGTTCCCTCC[CG]GAGTCATTAACTT[CG]TCTCCT[CG]T
GCTCAGGGACCAGCAACTTGGTGCTG[CG]GG[CG]CCAGAAAGA
AAAGGGTAG[CG]CCT[CG][CG]GAG[CG][CG][CG]GGGGAA
GAGGGACTG[CG]GCAG[CG]GGA[CG][CG]AGGG[CG]GGAGG
GG[CG]CAGCAG[CG]GGGAGC[CG]GAG[CG]CAG[CG]GAGGG
GAG[CG]CTGGGGGG[CG]GGGAG[CG]CT[CG]GGCAGCCACCC
TGTCCC[CG]TCTGGAGCCC[CG][CG]CTG[CG]TCTAGGAGGG
[[CG]]CAACA[CG]CAGTCCC[CG][CG]GGGGCCAGAGCT[CG
]GAGCCCCCTAGTGCATGCCCCCTCTCCT[CG][CG]CCCTGC[C
G]AGGCCT[CG]GCCCTGCCTGC[CG]TGCCCTGGGCCTGGTTGT
GCC[CG]GGGGTCCC[CG][CG]GGCAGGG[CG][CG]GGGCAGG
CAGGG[CG][CG][CG][CG]C[CG]A[CG]CTCTTTTGTCTGAT
AACTAATTTGAGTTAATG[CG]ATCTTTATGTAAAGCTAACAG[C
G]GATAATTGTCTATTTTCT[CG]CCAACAGTCTCCATCACAATC
ACTT
SEQ ID NO: 5262
ACTGATCAGCTCCAAGGACAGAC[CG]CTGGGAAGGGAAAAA[CG
]GCCCACAT[CG]AACTGGATGC[CG]GATGGAAACCTCTCTG[C
G]CTATTAGACTG[CG]TCCAGTACAGCAGATGGCA[CG]AGCA[
CG]TG[CG]G[CG]CTCAGCTTAGGCTCT[CG]GAGGCAGCTGAG
TTGGAAATCC[[CG]]A[CG]GAAAGCACCCACAAGCTCCCACTC
TG[CG]CTGGCCCACC[CG][CG]TGCA[CG]CCCACCCCCCA[C
G][CG][CG]TCCCTGGCTCAGAAG[CG]CACAGATGTTTACTGC
TTAGAGC[CG]GTAC[CG]CTGGGGAGAT[CG]AG[[CG]]ACTT
G[CG][CG]G[CG]CACAGTG[CG]G[CG]CTGGCAGGGCTCTGG
GCTCC[CG]GT[CG]GGGGTT[CG]AG[CG]GCCAAGGGATGGGG
GTGGGGG[CG]GGGAGAGTGGGGGGAGGG[CG]AAAGAC[CG]C[
CG]AGAGGAGGGGGGAGTGGGTGGACTAATGATGAAAAAGTCTCC
TCCATCCCAGTTCCTTAATTAAATGCATGGAAAGAAC[CG]AGG[
CG]AGCACATCTGGTTTCAATCTACAGCCCTTTGATGGCATCAAA
TGTTCTTTTCCCAGATCAGGGCTGGAAGTTCTGGGCTAACTATGG
C[CG]TTTGGA
SEQ ID NO: 5263
G[CG]AGCTGTTGGCTG[CG]AGGTGGG[CG]TG[CG]TGTGCTC
CATGAG[CG][CG]CCCCT[CG]CTCCCCTTGC[CG]CTT[CG][
CG]CC[CG]GCCTGCCAGCC[CG]ACTCTGGT[CG]C[CG]GCT[
CG]GTGGTGG[CG]G[CG]G[CG]GAGGCAG[CG]GCAGCTGGAG
CAGCAG[CG]CCTCTCTCCC[CG]CAGGACTGGCTCCTACCCTTG
GC[CG]TGATCCCCTCTGCT[CG]CTC[CG]CACCTGCC[CG]CC
TGGAGTCTTGGCTCAGCCCTCC[CG]CAGGG[CG][CG]GGG[CG
]CAGGGTG[CG]GGG[CG][CG]CTG[CG][CG]GGGCCT[CG]G
GAGGGGCTCC[[CG]]GAGCC[CG]TCTGTG[CG]CCTCCCACCT
[CG]GACC[CG]CTCCACTCC[CG]CCTCAAAGC[CG]GGGGGCT
GGGA[CG]C[CG]CTCCC[CG]CAGCCAATCAG[CG]GCTGCCTG
GAAG[CG]GAGTGTGTGTGGGGTGGGAGGGATG[CG]GAAGAGGA
GGGGGTCCCAGC[CG]CCT[CG]CTTGGCTCCACTTTCAGGGGAG
AAGATGCAGTTAGACCTGGGAGCCC[CG]AAGGAAGAC[CG]GAG
TGGAAAACAGGCTATCCCCAATCTCCAACCC[CG]AGGGAGGGG[
CG]TGGTGTGGGTAGGATCTGCCTCTCC[CG]CAG
SEQ ID NO: 5264
[CG]TGACTG[CG]GAGCCTGGAGGATG[CG]GGCTCCC[CG]AG
[CG]GGCTTCCCCTCTGCC[CG]G[CG][CG]ATGGAG[CG]GGT
[CG]GTGAG[CG]GAACAAAGG[CG]CCTGCC[CG]GGGGAG[CG
]GGTCTTC[CG]CTGAAGAG[CG][CG]GGTGG[CG][CG]C[CG
][CG]A[CG]GC[CG]CCTG[CG]GGCCAAGGTGGGAGGCTGTG[
CG]GCCCCAGG[CG][CG]G[CG][CG]CTC[CG]C[CG]TGGG[
CG]GG[[CG]]G[[CG]]ATCCCTGAGTC[CG]GCACCTGTG[CG
]C[CG]CTCCCTCTGTGCCTCC[CG]GGCAGCCC[CG]CCTGC[C
G]GCCT[CG]GAGTC[CG][CG]G[CG]C[CG]G[[CG]]GCTAG
AGGTCCAGAGG[[CG]]AACCACTTGCTGGTGCAGAAGAGAAACC
CTCAAATCCCTGGCCTTT[CG][CG]GAGA[CG]CCTGGA[CG]G
GGC[CG]TG[CG]C[CG]TGGACTGAGCAGG[CG]TCT[CG]GGG
AGCACTTCTGCAGAG[CG]AGGACTTCCATGTGAG[CG]ATTC[[
CG]]TTCTCCCCACCACCAATC[CG]ACCTCCCAGC[CG]TCTC[
CG]C[CG]CC[CG]AGCATCCTTGAGGTGGGA[CG]AGCAGGGGC
TTGGATCCCTGC[CG]GC[CG]TCTGGTGTGTGAGGCTTGCA[[C
G]]GCCCCTGGCTGCCC[CG][CG]CCT[CG]CC
SEQ ID NO: 5265
TGTCCCACT[CG]GGCCC[CG][CG]CCCCCACTTAGC[CG]CTG
AAGG[CG]TCT[CG][CG]GTGACTTTACCTTGCCTGGGGTGGAA
GTCAACTTCCCAAGACCTGGTGATGAAGAG[[CG]]AGAGATGGT
AGAGCAGCCCAGTCAGCCACTTGGCCACCCACATGGTTCCACCCT
GGGGACCC[CG]AT[CG]GGGAGGCCCACCAGAGC[CG]C[CG]G
CAGCCAAGC[CG]GCTTCCCT[CG][CG]CTC[CG]ATCCCTCTC
CTCCCTCT[CG]CC[CG]C[CG]CTCTC[CG][CG]CCTCAGCAG
CCTAGGGAACAGCAG[CG][CG]GGCCCTGGGC[[CG]]GCTGGT
CCAGCCACAC[CG]CCTGTCTC[CG]CT[CG]CTGAGC[CG]CTG
CTTCAT[CG]CACTGCAGCCTCACCCCCCTTCCTG[CG]CC[CG]
[CG]CTGCCCTCAGAAACTCTCTGCTCAGGTTCAGCT[CG]G[CG
][[CG]]GGGAAGCAACT[CG]ACCTAGCAGGAATGGTGCCAATA
TAGCCACCC[CG]GAC[CG]G[CG]AG[CG]C[CG][CG]GAGAG
CC[CG]CCCCTATGGGCTGTTCC[CG]GCCAATCAG[CG]GGAGG
[CG][CG]GCCCCTGCT[CG]CTTTTCCC[CG][CG]CAGCCCCC
TCCCTTCTCCACTCAGC[CG]CAAGGGGACTGC
SEQ ID NO: 5266
[CG]CC[CG]CCTGCCTGTCTCTAGGCTG[CG]GGAGGATTAGAC
ACATG[CG]CA[CG]ATTGGTCTCTTTGTGTGCACCAGGAAGGGT
CTGG[CG]T[CG]ATTTACACTTCCTAA[CG]GGGCAGAGACCTG
GAA[CG]GC[CG][[CG]]AGTGCTTGGGAATAAAAATGTACTGT
AAACAAGGCCAATGAAATAAGTGTCT[CG]CTCC[CG]CTGGCCT
TC[CG][CG]TTGGAAGTGTCCCCACTGCCCTTTCCC[CG]CTGC
ACAGCTTG[CG]AGTGGAGATTTAGAGCC[CG]GGAATGAGG[CG
]C[CG]TGTCCTTAGGAATCT[CG][CG]CC[CG]GGGAG[CG]C
TGAGGGAC[CG]GGGAGC[CG]GGTGGGGAG[CG]GGCCT[CG]G
GG[CG]CC[CG]G[CG]G[CG]GAGG[CG]CTCCCACC[CG][CG
][CG]GAGAGGGATGGAG[CG][CG]TCTTG[CG]AG[CG]TCTC
[CG]AGCCCAGCCACCCCA[CG]GGCCAGGGGGAGGGAG[CG]GG
GC[CG]G[CG]CATCAGCC[CG]CCCCCCC[CG]GCC[CG]CCCC
CTCCCCC[CG][CG]C[CG]GGGAGC[CG][CG]GTGGTG[CG]C
TC[CG]GCCAGCTGTG[CG]C[CG]C[CG]AG[CG]AGG[CG]CC
AGCC[CG]TGGGTGCTGC[CG]GGGG[CG]G[CG]G[CG][CG]G
TGGGGGCTCC[CG]CA
SEQ ID NO: 5267
AGGATG[CG]GGCTCCC[CG]AG[CG]GGCTTCCCCTCTGCC[CG
]G[CG][CG]ATGGAG[CG]GGT[CG]GTGAG[CG]GAACAAAGG
[CG]CCTGCC[CG]GGGGAG[CG]GGTCTTC[CG]CTGAAGAG[C
G][CG]GGTGG[CG][CG]C[CG][CG]A[CG]GC[CG]CCTG[C
G]GGCCAAGGTGGGAGGCTGTG[CG]GCCCCAGG[CG][CG]G[C
G][CG]CTC[CG]C[CG]TGGG[CG]GG[CG]G[[CG]]ATCCCT
GAGTC[CG]GCACCTGTG[CG]C[CG]CTCCCTCTGTGCCTCC[C
G]GGCAGCCC[CG]CCTGC[CG]GCCT[CG]GAGTC[CG][CG]G
[CG]C[CG]G[CG]GCTAGAGGTCCAGAGG[[CG]]AACCACTTG
CTGGTGCAGAAGAGAAACCCTCAAATCCCTGGCCTTT[CG][CG]
GAGA[CG]CCTGGA[CG]GGGC[CG]TG[CG]C[CG]TGGACTGA
GCAGG[CG]TCT[CG]GGGAGCACTTCTGCAGAG[CG]AGGACTT
CCATGTGAG[CG]ATTC[[CG]]TTCTCCCCACCACCAATC[CG]
ACCTCCCAGC[CG]TCTC[CG]C[CG]CC[CG]AGCATCCTTGAG
GTGGGA[CG]AGCAGGGGCTTGGATCCCTGC[CG]GC[CG]TCTG
GTGTGTGAGGCTTGCA[[CG]]GCCCCTGGCTGCCC[CG][CG]C
CT[CG]C[CG]GAGCC[CG]AGGGGG[CG]CA
SEQ ID NO: 5268
ATTAACCACTTTGCCAAAGGCCTGGC[CG]GGGGGGGGGAGAGGG
GACAAGGT[CG]TCAGGCCTGGCAGTCCAGGTGGGCACCCTGGGT
GGTGGCAGGACCCTAGAGCCCCCAGATCC[CG]GCTACTCAGGAT
CAACAGCAGCAGGTTCCAGGGAGGAAGGGTACTCACCTGGCTCCA
CTGGGCTCTGCAGAGGAAAAGCT[CG]CAGGGAGGACAGGGAGAG
ACCTCTG[CG]TGGATGAGCTCCC[CG]GCAGGGGACAGCAGC[[
CG]]GA[CG]CCTGGGTCA[CG]GGCAGTGG[CG]TG[CG]CTTG
CTCCTCTCC[[CG]]GCTGCCAAGGAGGCTGCTTCCATGCCC[CG
]CAGCCAGCTCCTGTCTGGCTGTGCAG[CG][CG]T[CG]CTGCT
GCCCCTGGTGAGA[CG]ATGTTCCCAGCTGAGCAG[CG]CAAGAA
GAGAGGCAAGAG[CG]AAATCAAAGCAG[CG]TGGAGGAGAGAGA
GGCAGAGAAGGGAGAAAGAA[[CG]]AGAGAGCCAGAC[CG]AAT
CTGCCTCCACCAATGGGATCAG[CG]GCTG[CG]CAG[CG]TCAG
GTGATAATAAGCAGGCTTGGTCCCTGCT[[CG]]C[CG]GGCTGG
TGGGAGGGGGAAAGGGCAGAGGGTCTCCCAGG
SEQ ID NO: 5269
AGACTGAG[CG]G[CG]AGAAAGTG[CG]AGC[CG]GGC[CG]GC
AGAATCTGCCTGG[CG]GG[CG]CTGGAGCCTG[CG]TTACT[CG
][CG]GCC[CG]CAGC[CG]TC[CG]GCTACTTTG[CG]TTTGGC
C[CG]GCCAG[CG]CC[CG]GG[CG][CG]C[CG][CG]CCATTG
CCTGCAGGCTAGGACTT[CG][CG]AGGTGGGT[CG]ACTCCCCC
TCCCTCCTCCTCTTCTTCCTCCTCTTCCTCCTCCTCTTGTTCCTC
CTCCTCCTCC[CG]ATTTTCCCTCCT[CG]GCTGG[CG]AGGGTG
GGGGGGG[CG]GGGGAGGC[CG]GGGCT[CG]CCC[CG]AGCAGC
CA[[CG]]ATGCTCCTGGA[CG]C[CG]GCCCCCAGTACCCAG[C
G]AT[CG]G[CG]TGACCACCTTTGG[CG][CG]TCC[CG]CCAC
CACTC[CG][CG]GG[CG]A[CG]TGGC[CG]AA[CG]AGA[CG]
TGGGCCTGGGCATCAACC[CG]TT[CG]C[CG]A[CG]GCATGGG
[CG]CCTTCAAGCTCAACCCCAGTT[CG]CA[CG]AGCTGGCTT[
CG]GC[CG]GCCAGA[CG]GCCTTCA[CG]T[CG]CAGG[CG]CC
AGGCTA[CG][CG]GCTGCTG[CG]GCCCTGGGCCATCACCATCA
CC[CG]GGCCA[CG]T[CG]GCTCCTATTCCAG[CG]CAGCCTTC
AACTCCA[CG][CG]GGACT
SEQ ID NO: 5270
GCATTTCAGGAAGTCATTGGTATCCATTGATAACAACCA[CG]TT
CTCCATTTTCCCAGAAGAGCCAGGAGCCACTTTCAGTCCTAGTTA
A[CG]AAAA[CG]CATGCATAAATCAACCACT[CG]GGT[CG]GT
[CG]GTCTTCTCCACTCCTTCAGCAGAGGA[CG]T[CG]G[CG]C
C[CG]GCTGCCT[CG]CC[CG]CCTGCCTGTCTCTAGGCTG[CG]
GGAGGATTAGACACATG[CG]CA[CG]ATTGGTCTCTTTGTGTGC
ACCAGGAAGGGTCTGG[CG]T[CG]ATTTACACTTCCTAA[CG]G
GGCAGAGACCTGGAA[CG]GC[CG][[CG]]AGTGCTTGGGAATA
AAAATGTACTGTAAACAAGGCCAATGAAATAAGTGTCT[CG]CTC
C[CG]CTGGCCTTC[CG][CG]TTGGAAGTGTCCCCACTGCCCTT
TCCC[CG]CTGCACAGCTTG[CG]AGTGGAGATTTAGAGCC[CG]
GGAATGAGG[CG]C[CG]TGTCCTTAGGAATCT[CG][CG]CC[C
G]GGGAG[CG]CTGAGGGAC[CG]GGGAGC[CG]GGTGGGGAG[C
G]GGCCT[CG]GGG[CG]CC[CG]G[CG]G[CG]GAGG[CG]CTC
CCACC[CG][CG][CG]GAGAGGGATGGAG[CG][CG]TCTTG[C
G]AG[CG]TCTC[CG]AGCCCAGCCACCC
SEQ ID NO: 5271
CAGAGGA[CG]T[CG]G[CG]CC[CG]GCTGCCT[CG]CC[CG]C
CTGCCTGTCTCTAGGCTG[CG]GGAGGATTAGACACATG[CG]CA
[CG]ATTGGTCTCTTTGTGTGCACCAGGAAGGGTCTGG[CG]T[C
G]ATTTACACTTCCTAA[CG]GGGCAGAGACCTGGAA[CG]GC[C
G][[CG]]AGTGCTTGGGAATAAAAATGTACTGTAAACAAGGCCA
ATGAAATAAGTGTCT[CG]CTCC[CG]CTGGCCTTC[CG][CG]T
TGGAAGTGTCCCCACTGCCCTTTCCC[CG]CTGCACAGCTTG[CG
]AGTGGAGATTTAGAGCC[CG]GGAATGAGG[[CG]]C[CG]TGT
CCTTAGGAATCT[CG][CG]CC[CG]GGGAG[CG]CTGAGGGAC[
CG]GGGAGC[CG]GGTGGGGAG[CG]GGCCT[CG]GGG[CG]CC[
CG]G[CG]G[CG]GAGG[CG]CTCCCACC[CG][CG][CG]GAGA
GGGATGGAG[CG][CG]TCTTG[CG]AG[CG]TCTC[CG]AGCCC
AGCCACCCCA[CG]GGCCAGGGGGAGGGAG[CG]GGGC[CG]G[C
G]CATCAGCC[CG]CCCCCCC[CG]GCC[CG]CCCCCTCCCCC[C
G][CG]C[CG]GGGAGC[CG][CG]GTGGTG[CG]CTC[CG]GCC
AGCTGTG[CG]C[CG]C[CG]AG[CG]AGG[CG]CCAGCC[CG]T
GGGTGCTGC[CG]GGG
SEQ ID NO: 5272
AAGA[CG]AAC[CG]AGTGC[CG]CTG[CG]GGAAGACACTGAAG
CAAGAG[CG]ACACCCCTTTC[CG]CCCCCCACCTTGCAG[CG]C
AGGCTTTGAAAGCTGCTCCCCCACCTGAATGGAAACT[CG]GAAC
[CG]C[CG]GG[[CG]]G[CG][CG]TTCCTTCT[CG]CCCAGCC
TTGCAATCCATGC[CG]AGAGGAAGGCAGTG[CG]AGCC[CG][C
G]CCAG[CG]CCCAGCTCC[[CG]]GGACAGGGT[CG]GCAATGC
TGCTGAGCAGAACTTGAT[CG][CG]CTCCTTCCT[CG]CTGCTA
GTGGAAG[CG]ATGCTGCA[CG]GCACAGCTAG[CG]CTTCCC[[
CG]]GCTCTCCTTCAAGCTGAAGGTTAC[CG]ACC[CG][CG]CA
GCCAGCCCCAGCACTGTGAGCTG[CG][CG]CCTCAGGTC[CG]G
GCTC[CG]GCTGCTTGG[CG]G[CG]G[CG]CCCAGGGCAACAAC
[CG]GGC[CG]CC[CG][CG]C[CG]GGG[CG]CACTGCACCAG[
CG]GCTT[CG]GCTTGGTGGATGTGTATGCATGAGTTCTGCAC[C
G]AATGGG[CG]CAAAAAG[CG]CCCCAGC[CG]GTCCACC[CG]
CTCCT[CG]ATCTTCCAGATCAGCAAGCCCC[CG]CTGCAGAG[C
G]GAGATTGGGAG[CG]CAGGGGCAG[CG]GCTC[CG]AGAG[CG
]C
SEQ ID NO: 5273
GGAGGGGAAAGA[CG]AAC[CG]AGTGC[CG]CTG[CG]GGAAGA
CACTGAAGCAAGAG[CG]ACACCCCTTTC[CG]CCCCCCACCTTG
CAG[[CG]]CAGGCTTTGAAAGCTGCTCCCCCACCTGAATGGAAA
CT[CG]GAAC[CG]C[CG]GG[CG]G[CG][CG]TTCCTTCT[CG
]CCCAGCCTTGCAATCCATGC[CG]AGAGGAAGGCAGTG[CG]AG
CC[CG][CG]CCAG[CG]CCCAGCTCC[[CG]]GGACAGGGT[CG
]GCAATGCTGCTGAGCAGAACTTGAT[CG][CG]CTCCTTCCT[C
G]CTGCTAGTGGAAG[CG]ATGCTGCA[CG]GCACAGCTAG[[CG
]]CTTCCC[CG]GCTCTCCTTCAAGCTGAAGGTTAC[CG]ACC[C
G][CG]CAGCCAGCCCCAGCACTGTGAGCTG[CG][CG]CCTCAG
GTC[CG]GGCTC[CG]GCTGCTTGG[CG]G[CG]G[CG]CCCAGG
GCAACAAC[CG]GGC[CG]CC[CG][CG]C[CG]GGG[CG]CACT
GCACCAG[CG]GCTT[CG]GCTTGGTGGATGTGTATGCATGAGTT
CTGCAC[CG]AATGGG[CG]CAAAAAG[CG]CCCCAGC[[CG]]G
TCCACC[CG]CTCCT[CG]ATCTTCCAGATCAGCAAGCCCC[CG]
CTGCAGAG[CG]GAGATTGGGAG[CG]CAGGGGCAG[CG]GCTCC
SEQ ID NO: 5274
GGGTGGC[CG]GGCAGCACCAGGGACAG[CG]CC[CG]GGACTCC
ACTGGGGAC[CG]GCTCCTGGGCTTCCCAG[CG]T[CG][CG]GG
TAGAGGTACAGCTGCTC[CG]TGTGC[CG]CAGGCTCCAGATTCT
[CG]CCACCCCACCCCTCCCTCAGAAACT[CG]GACTGCTCT[CG
]TCTGC[CG]TGTGGTTCTCTTTTCTTC[CG]AAAGGCCAGTGTC
TTATCTCTCCACTTCAAGTCCAGAGGACTTGCTCAGTCTCCTCCC
CTTAAGTCATTTCCACCATCCTCAGGCAGCTGTGGGAAGC[CG]A
GAGTCCTGGACTGTT[[CG]]TC[CG]GGTGCCAG[CG]CTGGCA
GTCCCAGTC[CG]TC[CG]GTGCAGCAGCC[CG]G[CG]CATTCC
CCTCTCTCCCTCCCTCTTGCTCTCCCTCCCTTTCTGTCTTCCTCT
CTTTCCTCCTCTACTGCTCCCTCCCTCTCTTGCCTCTTAAGTTTC
CTGCAC[CG]TGAATCCAACTGTGCCAAGCCTTGGCTCC[[CG]]
[[CG]]AACCAATCCTGAG[CG][CG]ACC[CG]GGCACTGGGA[
CG]G[CG]ACTC[CG]CCAAAGCTGGA[CG]AGGCAGC[CG]GAC
C[CG]TCTG[CG]CT[CG]AGCATGGAGA[CG]GAG[CG]CCTGG
GAGGGCA
SEQ ID NO: 5275
GA[CG]AC[CG]GACAGAGAGAGGCACTGAC[CG]AT[CG]CCAG
CAGCCTCC[CG]GTGGGAC[CG][CG]TCTCCTGCACACCC[CG]
[CG]CAG[CG]CCCCC[CG]C[CG]GAGC[CG]CAC[CG]GGCAA
GC[CG]G[CG]AGGGAG[CG]GGGCTGATTGG[CG]GC[CG]C[C
G]G[CG]GCCAGGGGAGGGGG[CG]C[CG][CG][CG]GGGCCAT
GGCAGGCT[CG]GAGG[CG]TCCTAGCC[CG]AGC[CG]GAGC[C
G]ATC[CG]AGCCCA[CG][CG]GC[CG]C[CG]CCTCTC[CG]C
TCC[CG]GGCCCC[CG]C[CG]CCAC[CG][CG]CCCCC[CG][C
G]GGAGATGGAACAG[CG]GAAC[CG]GCT[[CG]]GTGCCCT[C
G]GATACCTGC[CG]CCTCTGCTGCTGCATGCCCTGCTGCTCTT[
CG]TGGC[CG]A[CG]GTGAG[CG][CG]GGAACTTTGCTGC[CG
]CTGTGGACT[CG]GGGGGGTCTTTGCTGGGGC[CG]CCAC[CG]
AGAAGAAGAAGAAAGAGAA[CG]AAC[CG]GGAAGCTT[CG][CG
]GTCTCCAGCAATCC[CG]CTGTGCAGCCTGGGCC[CG]GAGGGG
TAGGGAGAGG[CG]AG[CG]G[CG]AAGGGT[CG]C[CG]CAGCA
GCAG[CG]C[CG][CG]CC[CG]AGT[CG]TTCCCAGTCC[CG]C
[CG]GGGCCC[CG]GCTG[CG]GAAAGGATGCCTGC
SEQ ID NO: 5276
GCCAGTGTCTTATCTCTCCACTTCAAGTCCAGAGGACTTGCTCAG
TCTCCTCCCCTTAAGTCATTTCCACCATCCTCAGGCAGCTGTGGG
AAGC[CG]AGAGTCCTGGACTGTT[CG]TC[CG]GGTGCCAG[CG
]CTGGCAGTCCCAGTC[CG]TC[CG]GTGCAGCAGCC[CG]G[CG
]CATTCCCCTCTCTCCCTCCCTCTTGCTCTCCCTCCCTTTCTGTC
TTCCTCTCTTTCCTCCTCTACTGCTCCCTCCCTCTCTTGCCTCTT
AAGTTTCCTGCAC[[CG]]TGAATCCAACTGTGCCAAGCCTTGGC
TCC[CG][CG]AACCAATCCTGAG[CG][CG]ACC[CG]GGCACT
GGGA[CG]G[CG]ACTC[CG]CCAAAGCTGGA[CG]AGGCAGC[C
G]GACC[CG]TCTG[CG]CT[CG]AGCATGGAGA[CG]GAG[CG]
CCTGGGAGGGCA[CG]TC[CG]GGG[CG]CTGGAGA[CG]CCAGG
CC[CG]AGTAGCTTCTCCATGGAGCCTGCCCAGAG[CG]GTCCCT
TCT[CG]CAGGATT[CG]CCCCAAGTCCTGTG[CG]GTA[CG]TA
CCCTTTGCCTC[CG]CTGTTCC[CG]GAGGGTACACCTGGGAG[C
G]GGGTGGTGGGCA[CG]AGGAAGGGA[CG]GCAGGGAGGGG[CG
]CTGGTT
SEQ ID NO: 5277
AGGCCAGTGTCTTATCTCTCCACTTCAAGTCCAGAGGACTTGCTC
AGTCTCCTCCCCTTAAGTCATTTCCACCATCCTCAGGCAGCTGTG
GGAAGC[CG]AGAGTCCTGGACTGTT[[CG]]TC[CG]GGTGCCA
G[CG]CTGGCAGTCCCAGTC[CG]TC[CG]GTGCAGCAGCC[CG]
G[CG]CATTCCCCTCTCTCCCTCCCTCTTGCTCTCCCTCCCTTTC
TGTCTTCCTCTCTTTCCTCCTCTACTGCTCCCTCCCTCTCTTGCC
TCTTAAGTTTCCTGCAC[[CG]]TGAATCCAACTGTGCCAAGCCT
TGGCTCC[[CG]][CG]AACCAATCCTGAG[CG][CG]ACC[CG]
GGCACTGGGA[CG]G[CG]ACTC[CG]CCAAAGCTGGA[CG]AGG
CAGC[CG]GACC[CG]TCTG[CG]CT[CG]AGCATGGAGA[CG]G
AG[CG]CCTGGGAGGGCA[CG]TC[CG]GGG[CG]CTGGAGA[CG
]CCAGGCC[CG]AGTAGCTTCTCCATGGAGCCTGCCCAGAG[CG]
GTCCCTTCT[CG]CAGGATT[CG]CCCCAAGTCCTGTG[CG]GTA
[CG]TACCCTTTGCCTC[CG]CTGTTCC[CG]GAGGGTACACCTG
GGAG[CG]GGGTGGTGGGCA[CG]AGGAAGGGA[CG]GCAGGGAG
GGG[CG]CTGG
SEQ ID NO: 5278
G[CG]CAGGAGCTGCAGC[CG]C[CG]CCTT[CG]CTGGAGCAGC
[CG]AGGGGC[CG]GTGCCACCTTTGCT[CG]CCCCCTCACTACC
ATGTACAGTGTG[CG]CTGCAAGAAGAAGG[CG]GGAGATGCATG
CACACCCC[CG][CG]ACC[CG]CTCCCTCTGGCT[CG]TCCCC[
CG]G[CG]TG[CG]CCACTGACCAGGGGGGAATGTGGTGAAGA[C
G]G[CG]AGGAGGAGAGC[CG]AGGGGGGAGGGGAGGGC[CG]GC
[CG]G[CG][CG]AACCCAGGC[CG]GAGGGTG[CG]AGGAGCCA
GAGGAGGCTGGAGGGGG[CG]G[CG]GCCACAGCTGGGT[[CG]]
GAGAAAGTTGCCCCCTATGCAGATGGCAACTGTGAGTACCCCTGT
GGGGGGGAGGGTGCAG[CG]AAGGCTGCCAGGGACCC[CG][CG]
AT[CG][CG]CCTTAACA[CG]TATTGGAG[CG]AGTGTG[CG]A
GTGATCATGAGTGTGAG[CG]GGTG[CG]AG[CG]CT[CG]G[CG
]GGGCTGAC[CG]TCA[CG]TTGG[CG]GGGC[CG]G[CG]GGGC
CAGGCAGTCTTCTC[CG][CG]TCCCCCTCCTCC[CG]CTC[CG]
TGCCTCCCCTCCCAGCAGCTCCCCCTCCC[CG]CCC[CG]CC[CG
]GCTC[CG]GCTCC[[CG]]GCCCCTAC[CG][CG]AGG[CG]CC
SEQ ID NO: 5279
ATGTCA[[CG]]GTCATGTTGCATCACTTCACTTGTTGAGCTGTG
[CG]AAGGCAGCACTTGACCACAGAAACTTGGTGAAC[CG]CCTT
GCTCTTAAATTAGCCCCCAAGAATTCTCTCCAGCCCTATAGAAAT
GTCTTACCTGCATGTGTCCCTGGTACATTCTGCTT[CG]GTTTCT
TCAGGGCTCCCTGAGGCCAC[CG]GATGCTTTTCCCC[CG]TGCT
TACTTGCCCACCAAAAGAGGGGAAAAGGTGGGTGCACAG[CG]GG
TTCTCAGAGGGTGCTCCTGAGCCCCCTGGAGCTC[CG]GGTACT[
CG]GC[[CG]]GC[CG]G[CG]GCCACT[CG]GCAG[CG]CTG[C
G]GGCTGC[CG]GGAACTGTTCTC[CG]CT[CG]GGGTGCTGAAA
G[CG]GA[CG][CG]GGAGAG[[CG]][[CG]]CAGAGAAGG[CG
]AGGAGC[CG]GGT[CG]GCCAGGCTCTCCTGCAGG[CG][CG]G
GTCCTGCT[CG][CG]GGG[CG]TCTCTAGAACTCACTCCTTCTT
[CG]C[CG]AACTCTTTCT[CG]CTTCCTGCCAGGTTGCCTCATG
TCTCTCTCTCTCTGAGCTG[CG]AACCCCCTCCTCCCAGCCCTGA
[CG]TGAG[CG]CCTACACCAGC[CG]C[CG]C[CG]CAGCTGC[
CG]AG[CG]GGG[CG][CG]C
SEQ ID NO: 5280
[CG]TCTGC[CG]TGTGGTTCTCTTTTCTTC[CG]AAAGGCCAGT
GTCTTATCTCTCCACTTCAAGTCCAGAGGACTTGCTCAGTCTCCT
CCCCTTAAGTCATTTCCACCATCCTCAGGCAGCTGTGGGAAGC[C
G]AGAGTCCTGGACTGTT[CG]TC[CG]GGTGCCAG[CG]CTGGC
AGTCCCAGTC[CG]TC[CG]GTGCAGCAGCC[CG]G[CG]CATTC
CCCTCTCTCCCTCCCTCTTGCTCTCCCTCCCTTTCTGTCTTCCTC
TCTTTCCTCCTCTACTGCTCCCTCCCTCTCTTGCCTCTTAAGTTT
CCTGCAC[[CG]]TGAATCCAACTGTGCCAAGCCTTGGCTCC[[C
G]][[CG]]AACCAATCCTGAG[CG][CG]ACC[CG]GGCACTGG
GA[CG]G[CG]ACTC[CG]CCAAAGCTGGA[CG]AGGCAGC[CG]
GACC[CG]TCTG[CG]CT[CG]AGCATGGAGA[CG]GAG[CG]CC
TGGGAGGGCA[CG]TC[CG]GGG[CG]CTGGAGA[CG]CCAGGCC
[CG]AGTAGCTTCTCCATGGAGCCTGCCCAGAG[CG]GTCCCTTC
T[CG]CAGGATT[CG]CCCCAAGTCCTGTG[CG]GTA[CG]TACC
CTTTGCCTC[CG]CTGTTCC[CG]GAGGGTACACCTGGGAG[CG]
GGGTGGTGGGC
SEQ ID NO: 5281
CAC[CG]GACAGAAATGTCA[[CG]]GTCATGTTGCATCACTTCA
CTTGTTGAGCTGTG[CG]AAGGCAGCACTTGACCACAGAAACTTG
GTGAAC[CG]CCTTGCTCTTAAATTAGCCCCCAAGAATTCTCTCC
AGCCCTATAGAAATGTCTTACCTGCATGTGTCCCTGGTACATTCT
GCTT[CG]GTTTCTTCAGGGCTCCCTGAGGCCAC[CG]GATGCTT
TTCCCC[CG]TGCTTACTTGCCCACCAAAAGAGGGGAAAAGGTGG
GTGCACAG[CG]GGTTCTCAGAGGGTGCTCCTGAGCCCCCTGGAG
CTC[[CG]]GGTACT[CG]GC[[CG]]GC[CG]G[CG]GCCACT[
CG]GCAG[CG]CTG[CG]GGCTGC[CG]GGAACTGTTCTC[CG]C
T[CG]GGGTGCTGAAAG[CG]GA[[CG]][CG]GGAGAG[[CG]]
[[CG]]CAGAGAAGG[CG]AGGAGC[CG]GGT[CG]GCCAGGCTC
TCCTGCAGG[CG][CG]GGTCCTGCT[CG][CG]GGG[CG]TCTC
TAGAACTCACTCCTTCTT[CG]C[CG]AACTCTTTCT[CG]CTTC
CTGCCAGGTTGCCTCATGTCTCTCTCTCTCTGAGCTG[[CG]]AA
CCCCCTCCTCCCAGCCCTGA[CG]TGAG[CG]CCTACACCAGC[C
G]C[CG]C[CG]CAGCTGC
SEQ ID NO: 5282
GAAAGGGAAAGAGAAAGCC[CG]GGC[CG]CCAGAG[CG]CTTAA
TCACA[CG]TACATCCTAC[CG]GGCCCCTCTCCAGCTGGCTCAG
GCTCCACACTGGTCCTCCAGCTCCCTTTTCTCAG[CG]ATGGACT
CACAGCCCCACC[CG]GAG[CG]CTGGAG[CG][CG]GA[CG][C
G]GTCACTG[CG][CG]TG[CG]CCTCAC[CG][CG]CTGGCACC
C[CG]GCCTGGCAGCCTTTGGGGACCTGAACCAGCTG[CG]CCTG
[CG]CAGGTGGAA[CG]GGTGGAA[CG]GGTGGGGGAG[CG]GAC
AGT[CG]AA[CG]GCCTGAGAGGGCTCAGCTGGTC[[CG]]GGTG
GGATTCTGAAGGCCAG[CG]GAGGTGGGCTTACTAGGGAAAGGGG
[CG]CAGCAGTAACTACC[CG]CAACTGAG[CG]G[CG]GGATCT
G[CG]GC[CG]CC[CG]GGGCCCT[CG]GCCAACATCCCAGCATC
CTCTG[CG]C[[CG]][CG]C[CG]GCCC[CG]GACTCCATTTCC
CAG[CG]GCCCCTG[CG]GCCTGCCCTAGGGCTG[CG]G[CG]CC
TTTGTGAG[CG][CG]GC[CG]C[CG]GCCAGGAT[CG]AGCCCT
GGCC[CG]GGCCCTGGCCCAGCCC[CG]GCCTCCAAGGAC[CG][
CG]C[CG]AAGGAGGTGCCCACTGGAGGGAGGAGG
SEQ ID NO: 5283
GCTTAC[CG][CG][CG]CA[CG]CCTGGCTGGAGAGGTGA[CG]
C[CG]CTGTCTGCCAACCTTTCCCAGCTTTTCCCA[CG]ATTGGA
GCCAAGAGAGGTCCC[[CG]]GGGATCTCAGTTGGGCAATTGTAA
GGGAAGGAGCTCAGGACACTGACTTCAAGATGAAGGGGGAGGTCA
G[CG]AAGACAGTTCTAGGGTGGG[CG]G[CG]GC[CG]CTGACA
GAGCAGGAGCCACAGCCAC[CG]GGGCTTGGAGATAGGAGCAAGT
[CG]CAGG[CG]GAGGGGGCTG[CG]GGCTGGCTGCCTGGGCAGC
ACAGGACTTGAGGGAGCTG[[CG]]GGGACTCCTGGAGTCTCATC
AGGCCTTCCAGT[[CG]]CTGTGGGGACCC[CG]GCTG[CG][CG
][CG]GAT[CG]CCTG[CG]CCACTGTCCCCACTGACC[CG]CC[
CG]C[CG]GGTTTGCCAATTACCAG[CG]CCACCTGGTCC[CG]C
ACCCAACCCCACATTTTCTCTGTCAAGGGCTTGTTTCCAGGGCTC
CAGGAACTTTCAAAATGTTATTGGTGTGTGT[CG]GGGGGGTGGG
GGG[CG]GGGGGGTTGTGTGGGGG[CG]GGAGTGTAAAGGAGGAG
GGAACTCTTCTTTTCTCTTTGTCTTTGTAAATGGACACCT
SEQ ID NO: 5284
GAGGCCTGACTTGCAAGCAGCTTTCTT[CG]CCT[CG]TTCT[CG
]GGGCTTCAGGGAGG[CG]G[CG]ACTGGAGCCC[CG]CTGCCTA
CTCACAACAAAAGAAAGCAGGGCTGG[CG]CCCCTACA[CG][CG
]CTCCCATTCACTGC[CG]GC[CG][CG]GGGAGAATCCTACCC[
CG][CG]CCCT[CG]CCAGGGTCC[CG]GGGAGCTCTGGGCTGG[
[CG]]GAGG[CG]AACAAGATG[CG]GTTTGACAGAACCAGGC[C
G]TGCTTCTGCAAACCTCAATGC[CG]CTC[CG]CCAGC[CG][C
G]G[CG]GCCTCCCAGACTCCATTTGC[CG]GGGAGCTC[CG]AG
C[CG][CG]CAAAATCTCTGCAAGCTGTGCTCTGCAGAATGCAAA
GC[CG]GGCTGGAATC[CG]CCATTCC[CG]C[CG]CCCCAGC[C
G]ACT[CG]GC[CG]A[CG]AGCTCCCTCCTGAGCCTCC[CG]GG
CCATCTGC[CG]GGA[CG]GTTACCT[CG]TT[CG]GTGAAGC[C
G]GTGCATTCACCACATCCTCTGCTGCTCCTAGCAGGGAAGC[[C
G]]G[CG]GTGAGG[CG]GGGGAGCAGGCATGGTGGCTC[CG]GG
GTTTATG[CG]GGGTTTACTGCTTACCCAGAATAG[CG]GCTACT
GCTGCCTACTAGGG[[CG]]CACCTAC[CG]CT
SEQ ID NO: 5285
TCTTCATGCCTCAGAAA[CG]TGGCCTACTCTGCATT[CG]GTGT
GTG[CG]GAAGCAGCAATCACAGAGGCAGCCCTAATAC[CG]GAG
G[CG]G[CG]G[CG]GCAGCAGCAGGGCCAGGTGGTAGCT[CG]G
GGCTGAGGAT[CG][CG]G[CG]GGGGCAGC[CG]CTATGGGGCC
CAAGCCCTGACACA[CG]TACCATT[CG]CTCAAGT[CG]G[CG]
GTA[CG][CG]C[CG]CCAC[CG][CG][CG]AGGAGGCCACCTG
GGACTTGTGGC[CG]CAGTC[CG]A[CG]AGGG[CG]ACA[CG]A
GGGCAGA[CG]GTGTAGC[CG]AAT[CG]TAGCCAGAGCTGGG[[
CG]]G[CG]G[CG]AG[CG]CC[CG]TGCACCTTCATGTGCTTA[
CG]CAG[CG]AGCTGGGGTG[CG]TGTAGCACTTGT[CG]CAGCC
C[[CG]]CACCTTGCA[CG]TGTATGGCTTGT[CG]CTAGTGTGC
A[CG]TG[CG]AATGCTTCTTA[CG]GT[CG]CTGCTGTTGG[CG
]AAG[CG]C[CG]CT[CG]CAGCCCT[CG]AACT[CG]CATCTGA
AGGGCTTCT[CG]CCTGG[CG]GAGGCAA[CG]CAGAGACATTAG
TGCTTGTGGGT[CG]TGTTCC[CG]TCAGGTGCTTGCCACCCTCC
CCCATT[CG]TCTCTCATTTTCTGGAAAAGAACTACAAAATAT
SEQ ID NO: 5286
CCCCAGACCCAGAGCTGCCC[CG][CG]GATGAGGAGGGGG[CG]
TGGCTGAGGGACA[CG]GTGTTTGTTCCCCATCCCTGAGTTC[CG
]TG[[CG]]GACCTGCCCCAGCCCCAGCACAGTCACCCTGTGGAA
CTGGCATCCAGGAGAGGTGCTC[CG]CTCTGTG[CG]CTCCTTCC
TCC[CG]GCTGTGTGCTCCCTGTCCACAGCTCCCCATCCACAGCT
T[CG]GCACTGTGGGGCTGGTGCTCCAGGAGGGAAGGCC[CG]GT
TCTTTGCATCCCCTTTC[CG]CAAC[CG]CTAGGGTCTCTGTG[C
G]GGCCCTAGAGGAA[[CG]]CTCACTCAT[CG][CG]CAGCTCA
CCAGGGACCCCAGCTTGGCAGAAACCAGGGGCTCTCTG[CG]GGT
TCTCTCAAATGAGTCCTTTG[CG]GTGGGGGAG[CG][CG]GATG
GGGAGGTGGGTG[CG]TCCCT[CG][CG]A[CG]GGAACTACCTC
ACCAG[CG]GTCCTGTC[CG]GGGCTCCTTCACCTCAGTGTCCTC
TTCTCTACAATGGGAGTGA[CG]GCCCTGCTTTGGGTTGGAGGAA
TTTAAAGGAGTTAA[CG]TATGG[CG]CC[CG]CAGGGCTCA[CG
]AAAGGTAGC[CG]TGTGGTTTTTC[CG]ACCTTTTTTATTA
SEQ ID NO: 5287
ATAC[CG]GAGG[CG]G[CG]G[CG]GCAGCAGCAGGGCCAGGTG
GTAGCT[CG]GGGCTGAGGAT[CG][CG]G[CG]GGGGCAGC[CG
]CTATGGGGCCCAAGCCCTGACACA[CG]TACCATT[CG]CTCAA
GT[CG]G[CG]GTA[CG][CG]C[CG]CCAC[CG]C[CG]C[CG]
AGGAGGCCACCTGGGACTTGTGGC[CG]CAGTC[CG]A[CG]AGG
G[CG]ACA[CG]AGGGCAGA[CG]GTGTAGC[CG]AAT[CG]TAG
CCAGAGCTGGG[CG]G[CG]G[CG]AG[CG]CC[CG]TGCACCTT
CATGTGCTTA[CG]CAG[CG]AGCTGGGGTG[CG]TGTAGCACTT
GT[CG]CAGCCC[[CG]]CACCTTGCA[CG]TGTATGGCTTGT[C
G]CTAGTGTGCA[CG]TG[CG]AATGCTTCTTA[CG]GT[CG]CT
GCTGTTGG[CG]AAG[CG]C[CG]CT[CG]CAGCCCT[CG]AACT
[CG]CATCTGAAGGGCTTCT[CG]CCTGG[CG]GAGGCAA[CG]C
AGAGACATTAGTGCTTGTGGGT[CG]TGTTCC[CG]TCAGGTGCT
TGCCACCCTCCCCCATT[CG]TCTCTCATTTTCTGGAAAAGAACT
ACAAAATATTTTCAGAAATCCCTTTCCA[CG]G[CG]CCTCAGGT
[CG]AGCACCCCTTTCCCT[CG]TGCAGAGAG[CG]CCCC[CG]G
TGCC
SEQ ID NO: 5288
GG[CG]GGGAGAGGAGTCCCTCCCCAACTTCACTCCCCTAATCAA
GC[CG][CG]GGTGAGATAGGCAGC[CG]G[CG]GTTTGTGCCCA
TCTGTGGGGGCAAGTCCTACCTTCTGCCAAAAGG[CG][CG]A[C
G]CATGCACAAAAGATGGATCCAGGCTATCTTTCTCTGCCATCAG
CTCAGGCAAATATTTCTCCTCTTCCATAG[CG][CG]GACTT[CG
]GATTGTCCC[CG]GG[CG]AAG[CG][CG]AGGTTC[CG]CT[C
G]CT[CG]GA[CG]CAGGCAGGGTCTTGGGGCAG[CG]CCTGGCT
CC[CG][CG]CTGCTCCTCCTC[CG][CG][CG]G[[CG]]AGGG
ATCTCTGTG[CG]TCCTCACTGGCCCATGCACCCAGCACCTG[CG
]ACTCC[CG]C[CG]T[CG]GGCTG[CG]TGGCCC[CG][CG]CC
CACACCTGCC[CG]TCCCTTC[CG]T[CG]TCCCT[CG]CT[CG]
[CG]CAGAGCCC[CG]GCTCACACCAG[CG]GCCTTAACTGGAGA
GG[CG]GGAACAGGA[CG][CG]GCCCACCTC[CG]CCAACCACT
CATTGGTGGTGGTGCCAGGAGAGG[CG]GGG[[CG]]CTGGCAGA
AGGC[CG][CG]GGCTCTCATTGGG[[CG]]GTAG[CG]CAAGT[
CG]GGTGGCCTGACTGGCAGGAGGCAGCTGCAGAGGG
SEQ ID NO: 5289
CCCCCTTCCTGTATTAGCATG[CG]GG[CG]G[CG]G[CG]AGC[
CG]GC[CG]GGTGGGGAGGG[CG]G[CG]GTGGCAT[CG]CTG[C
G][CG]GGG[CG]CATTGTGGGC[CG][CG]CT[CG]CCTC[CG]
[CG]GGGGACCATCTGCT[CG]CTGTCAATGCATCACCTGCT[CG
]TCTGGGC[CG]T[CG]C[CG]GGGCAA[CG]GGGGG[CG]GGGG
ATTAAGGAG[CG]TGTG[CG]TCT[CG]GTC[CG]GGC[CG]AGG
[CG]G[CG]AGGTGGGGGTTGGGG[CG]GGGGAGGAGAGCTCCTT
GGCCCCCCACCCCCCTGCCC[CG]AGA[CG]GGT[CG]ACC[CG]
CT[CG]GGGGC[CG]G[[CG]]ACCAC[CG][CG]A[CG]GGTTC
[CG]C[CG]CTTGCCTC[CG]CTCCTTGGCCTTTGCTGC[CG]TG
CTGCCTCTTCTCA[CG]GG[CG][CG]GCTGGAGTCC[CG]GGGA
GCAGCAGAGAGCAAA[CG]GTC[CG]GCTCTACCTCACCCTGCCA
GGGGG[CG]AGTCC[CG][CG]CTCCCTG[CG]TCTACCTGGAGC
TGCAGGGTCCCTATCC[CG]GGG[CG]C[CG]CC[CG]CAGCCTC
CTC[CG][CG]GGAGCTGGAGCACTCTGCTGGGTCCTGGGGA[CG
][CG]G[CG]CAG[[CG]]TGGTTCCAAG[CG]CTC[[CG]]CAG
T[CG]C[CG]GGCAACCACAATGGGG
SEQ ID NO: 5290
[CG]AG[CG][CG]AG[CG]CAAC[CG][CG]TCAAGTTGGTCAA
CCTGGGCTTTGCCACCCTT[CG]GGAGCA[CG]TCCCCAA[CG]G
[CG][CG]GCCAACAAGAAGATGAGTAAGGTGGAGACACTG[CG]
CT[CG]G[CG]GT[CG]AGTACATC[CG][CG][CG]CTGCAGCA
GCTGCTGGA[CG]AGCATGA[CG][CG]GTGAG[CG]C[CG]CCT
TCCAGGCAGG[CG]TCCTGT[CG]CCCACCATCTCCCCCAACTAC
TCCAA[CG]ACTTGAACTCCATGGC[CG]GCT[CG]C[CG]GTCT
CATCCTACT[CG]T[CG]GA[CG]AGGGCTCTTA[CG]ACC[CG]
CTCAGCCC[CG]AGGAGCAGGAGCTTCT[CG]ACTTCACCAACTG
GTTCTGAGGGGCT[CG]GCCTGGTCAGGCCCTGGTG[CG]AATGG
ACTTTGGAAGCAGGTAGGTTGCATTTTGGGGTGGGCAGGGGGGTA
TTCTTGCCTT[CG]TCCTCCCTCTGAGTGTCTGTGGAAGTGGGGA
TGTCTCCAAGGAGATAAGGGGATTTTTATTTAAAGAATTTGTGAA
AGTTGGT[CG]ATTTCAAGTCCTAGTTTGTTAGTTTCAGCACTGG
CCTCTGAAAATGGCCTTGCCCAGGTCTCCAAGGAGTGAAGGGTAG
TAGTG
SEQ ID NO: 5291
C[CG]GAGAGACCT[CG]GAGCAGAGAAGG[CG]C[CG]C[CG]A
CCCT[CG][CG]GCTGCCTGGCC[CG][CG]GCTCCTACAAAGG[
CG]GGCTAGC[CG]CC[CG]CCCTCTCCCTTGCCTTCCTCCCCTT
CTTTTCTGACTTTCCCTCTTTCCCTTAAT[CG]CCTGCTTCTTCC
TC[CG]GGTGGACTTA[CG]GCCACCTTGCTCCTC[CG][CG]CT
TCACCTCAT[CG]CCCCCTCTTTCTTTCTTCTGCCTCTCTCTCTG
[CG]CCCCCTTCTCTC[CG]TGTCA[CG]CTCCCTCCTGGTTCTG
[[CG]][CG]TCTACAAACTTTTGAGCAGAACA[[CG]]AGCCT[
CG]GCAAA[CG]AGTCC[CG]CAGCTCCTCCTGCTGCTCC[[CG]
]CTGGTTCCTG[CG]GCTTCTGCTCAGACACCAA[CG]CCAGA[C
G]G[CG]ATGCCTCT[CG]GGTGGTGACTCCAG[CG]CAGGAACT
TGAAGAAG[CG]CTTTGCC[CG]C[CG]TCCTACCTGGCAGCTCT
CCTGGCAG[CG]GGAGGAGTTGAAGGGTAAGGGAGGGAAAATCTT
ACCAAAG[CG]AC[CG]GCTCACT[CG]ACTGCTGATTCTTT[CG
]CTTGGCAT[CG][CG]TCAGGGGAGTTAGCTTTCCTTCAGC[[C
G]]GGTCTGGCTAGTTATTGGG[CG]
SEQ ID NO: 5292
TTGCTCTTAAATTAGCCCCCAAGAATTCTCTCCAGCCCTATAGAA
ATGTCTTACCTGCATGTGTCCCTGGTACATTCTGCTT[CG]GTTT
CTTCAGGGCTCCCTGAGGCCAC[CG]GATGCTTTTCCCC[CG]TG
CTTACTTGCCCACCAAAAGAGGGGAAAAGGTGGGTGCACAG[CG]
GGTTCTCAGAGGGTGCTCCTGAGCCCCCTGGAGCTC[CG]GGTAC
T[CG]GC[CG]GC[CG]G[CG]GCCACT[CG]GCAG[CG]CTG[C
G]GGCTGC[CG]GGAACTGTTCTC[CG]CT[CG]GGGTGCTGAAA
G[CG]GA[[CG]][CG]GGAGAG[CG][CG]CAGAGAAGG[CG]A
GGAGC[CG]GGT[CG]GCCAGGCTCTCCTGCAGG[CG][CG]GGT
CCTGCT[CG][CG]GGG[CG]TCTCTAGAACTCACTCCTTCTT[C
G]C[CG]AACTCTTTCT[CG]CTTCCTGCCAGGTTGCCTCATGTC
TCTCTCTCTCTGAGCTG[[CG]]AACCCCCTCCTCCCAGCCCTGA
[CG]TGAG[CG]CCTACACCAGC[CG]C[CG]C[CG]CAGCTGC[
CG]AG[CG]GGG[CG][CG][CG]C[CG]TTCTCCCAGC[CG][C
G]TGCCTGC[CG]AGAGGC[CG][CG]GGAC[CG]GGCA[CG][C
G][CG][CG][CG]TTCCCAGGGGCCTGGGAG[CG]GCC
SEQ ID NO: 5293
CTGGCCTTGGTAGA[CG][CG]GGCTTCACTACTAG[[CG]]TGG
TGC[CG]C[CG]CTGCTGGCCAACCTG[CG][CG]GACCAG[CG]
CTCTGGCTGC[CG][CG]CAGCCACTGCA[CG]GCCCAGCTGTG[
CG]CAT[CG]CTGGCTCTGGGTTC[CG]C[CG]AATG[CG]TCCT
CCTGG[CG]GTGATGGCTCTGGAC[[CG]][CG][CG]GC[CG]C
AGTGTGC[CG]CC[CG]CTG[CG]CTATG[CG]GGGCT[CG]TCT
CCC[CG][CG]CCTATGT[CG]CA[CG]CTGGCCAG[[CG]]CCT
CCTGGCTAAG[CG]GCCTCACCAACT[CG]GTTG[CG]CAAAC[C
G][CG]CTCCTGGCTGAG[[CG]]GC[CG]CTGTG[[CG]][[CG
]]CCC[CG]CCTGCTGGACCACTTCATCTGTGAGCTGC[CG]G[C
G]TTGCTCAAGCTGGCCTG[CG]GAGG[CG]A[CG]GAGACACTA
C[CG]AGAACCAGATGTT[CG]C[CG]CC[CG][[CG]]TGGTCA
TCCTGCTGCTGC[CG]TTTGC[[CG]]TCATCCTGGCCTCCTA[C
G]GTGC[CG]TGGCC[CG]AGCTGTCTGTTGCATG[CG]GTTCAG
[CG]GAGGC[[CG]]GAGGAGGG[CG]GTGGGCA[CG]TGTGGGT
CCCACCTGACAGC[CG]TCTGCCTGTTCTA[CG]GCT[CG]GCCA
TCTACACCTACCTGCAGCC[CG][CG]CAG
SEQ ID NO: 5294
AGGGG[CG]AGGCT[CG]AGGGTCCCTAGGGGTGGTGGGA[CG]C
AAGGCCCATGCC[CG]TCTATGGCCTCT[CG]C[CG]C[CG]GCA
GCT[CG]CAGCCACC[CG]AGCAT[CG]CCT[CG]G[CG][CG]G
GC[CG][CG]A[CG]CTCTC[CG]CCC[CG]AGGGCA[CG]CTCC
[CG]GGGCTCTTGGC[[CG]]CCCCT[CG]CCCAC[CG]GGCTCT
GGGTAGCCCCTCACCAGGCTCTTGG[CG]GCCACCTAGCC[CG]G
[CG]CC[CG]GCCCCCTG[CG]GC[CG]GCCCATTTAGTGTGAAT
CCTGGATC[CG]GCAG[CG]G[CG]G[CG]GCTTCTTCAGGGGTA
GCTGATGC[CG]GGGCCTTGGAGAGGGA[CG]CTTTGGGAGGGTC
CTGGGAGG[CG]G[CG][CG]G[CG]AGCAAAGGGGGCAAGAAGG
G[CG]TGCTGTGCTCC[CG]CCTGGCTCC[CG]GGG[CG]T[CG]
TTTGGGGG[CG]GC[CG]GGGAGTTTTCTACTTGGAAGCCCCTCT
GAAGCCAC[CG][CG]TCTCCTTTGCC[CG]GCCT[CG]TCTC[C
G]CTGCCCA[CG]CAGGCTGC[CG][CG]CTCTGGCCT[CG]GCC
C[CG]GCTCT[CG]GAGCTGCC[CG]G[CG]GGCTC[CG]GGTCT
[CG]CCCTCCAGCCCCCAGG[CG]GCC[CG][CG]G[CG]GATCC
C[CG]AGAGGCAGC
SEQ ID NO: 5295
TGCTCTTTCCCCCTC[CG]GAAGCCCT[CG][CG]TCCTCATCCT
TACCCCACCTCTTGTTCCCCAAG[CG]TGGCCAGGGCTAAGGCTC
CAGGGATG[CG]CCAAGCACCCTT[CG]GTTTTCC[CG]GGGAGA
ATTTTCCC[CG]GCC[CG]GGGACTAGGGTCTGG[CG]CTGGGG[
CG]CCCCT[CG]GACCTG[CG]GGAT[CG]CCCCTACACTCTGG[
CG][CG]CTGAGGG[CG]GTGAG[CG]AGGG[CG]CCAAGGCACA
GGTGGGG[CG]GGAGT[[CG]]AG[[CG]][[CG]]GAGGCT[CG
]GGGGG[CG]GGA[CG][CG]GGGCCTGGGAG[CG]GCCAGGGAC
[CG][[CG]]GCAG[CG]CCTCAGTGCCAGCCTGG[CG]CC[CG]
[CG]ACTGCCTGCCCCAGCCCCTCAGTGG[CG]GCTTGCTCTCTT
CTCT[CG]CTC[CG]AACCAGACACAGC[CG]CTGC[CG]CTGC[
CG]TC[CG]G[CG][CG]CTACAGACTCC[CG]AGAACAGCCCTG
GCTGTCAG[[CG]]AGCACCAGC[CG]CTTCCTGTCCCCAT[CG]
[CG]GAGACTGGAGGGG[CG]CACCA[CG]GCCATGGAGCCAGAG
G[CG]CTTCAGGAGGCAAGAGAAGTCCC[CG][CG][CG]CTC[C
G]CAGCC[CG]G[CG]CAGCTCATGGTGAG[CG]CCCTCTGGGGC
T[CG]AGG
SEQ ID NO: 5296
TCTT[CG]TTTTCTTAGATTTCAAACTTGCAAGGAT[CG]CAAGG
ATCCAGGGCCCCAGGAAAGGAGGGGTGTGAAGGACTCAAAATTCC
AGCAGCTTGGCTGGGGTGGCTG[CG]CCAGA[CG]GGCCCTTCCC
CAAAGTGCAAACCCACCCCTGTCCT[CG]GCCC[CG]G[CG][CG
]CTCCCTCCCTCAGCC[CG]GGGC[CG]TACACCACCTGCCCTCT
AC[CG]AGAGATCTGGG[CG]G[CG]G[CG]GC[CG]AAAGCAG[
CG]A[CG][CG]CC[CG]GAGCATCCCTTG[CG]ATA[CG]CTAG
GGGA[CG]GTGCTTTCTCTGTCCCAGTTG[[CG]]TG[CG]G[CG
]GGGCTGGGGCCCAGGC[[CG]]CCCCAAATCTCCCCCACTAGAG
TGACCAC[CG]CACAGTTGTCCC[CG]CTGGG[CG][CG]CTCCT
C[CG]GTGTCTG[CG]CTCAGC[CG]CTCTCCTCTTCTCTCTCC[
CG]CC[CG]CC[CG]CAG[CG]CCATGGTCTGGCAGTGTGTTTAG
[[CG]]CTCACCACCATGTGCACCAGCTTGTTGCTAGTGTACAGC
AGCCT[CG]G[[CG]]GCCAGAAGGAG[CG]GCCCC[CG]CAGCA
GCAGCAGCAGCAGCAGCAACAGCAGCAGCAGG[CG]T[CG]GCCA
C[CG]GCAGCT[CG]CAGC[CG]G[CG]G
SEQ ID NO: 5297
GCCCCTTTCCCTAA[CG]CTGCCCACTGAGG[CG]TCCTCAC[CG
]TCTACCCTGTTGGGGT[CG]CTCTCTGACCCC[CG][CG]CTGC
ATCCC[CG]GGAC[CG]ACCCACCTGCTG[CG]CAGCTACCCCAG
GC[CG]GTCCCAGC[CG]CC[CG]GAGCCCCAGTG[CG][CG]AT
GG[CG]GC[CG]GCAAACTG[CG]CCTG[[CG]]CACTGGGCCTC
AC[CG][CG]GACTA[CG]ACTCCCACAATGC[CG][CG]AGGCT
GTGC[CG][CG]CAC[CG]GGG[CG]AGCAAGGGAGC[CG]TGAC
AGGTGACAGTG[CG]CATGGCCAATCAGA[CG][CG]AGTGTGGC
CTCC[[CG]]G[CG]TCC[CG]CCCACTC[CG]G[[CG]]CCTG[
CG]TCATTTTGGGCACCATGGCAA[[CG]]AAGTAAACAAG[CG]
GGTAAATAATAGACCCCTGACAGCCAGAGACC[CG]GAGAAACAA
AGA[CG]GTGAGAAA[CG]GAGAAACAAAGACAAAAAGA[CG][C
G]CAGAC[CG]GGAGGGAGAGAAGCATGAAGGCCCACAGA[CG]C
T[CG]GGGGCAGACCAAGA[CG]CCCTGGGGTCCC[[CG]]AAAC
AGAGATGTACAGAGT[[CG]]GACA[[CG]]GAAAGGGAGAGACC
AGCTCA[CG]GTTAAGAAAGGAGGGAGACCAGCCCAGGATCAA
SEQ ID NO: 5298
GTGAAC[CG]CCTTGCTCTTAAATTAGCCCCCAAGAATTCTCTCC
AGCCCTATAGAAATGTCTTACCTGCATGTGTCCCTGGTACATTCT
GCTT[CG]GTTTCTTCAGGGCTCCCTGAGGCCAC[CG]GATGCTT
TTCCCC[CG]TGCTTACTTGCCCACCAAAAGAGGGGAAAAGGTGG
GTGCACAG[CG]GGTTCTCAGAGGGTGCTCCTGAGCCCCCTGGAG
CTC[[CG]]GGTACT[CG]GC[[CG]]GC[CG]G[CG]GCCACT[
CG]GCAG[CG]CTG[CG]GGCTGC[CG]GGAACTGTTCTC[CG]C
T[CG]GGGTGCTGAAAG[CG]GA[[CG]][CG]GGAGAG[[CG]]
[[CG]]CAGAGAAGG[CG]AGGAGC[CG]GGT[CG]GCCAGGCTC
TCCTGCAGG[CG][CG]GGTCCTGCT[CG][CG]GGG[CG]TCTC
TAGAACTCACTCCTTCTT[CG]C[CG]AACTCTTTCT[CG]CTTC
CTGCCAGGTTGCCTCATGTCTCTCTCTCTCTGAGCTG[CG]AACC
CCCTCCTCCCAGCCCTGA[CG]TGAG[CG]CCTACACCAGC[CG]
C[CG]C[CG]CAGCTGC[CG]AG[CG]GGG[CG][CG][CG]C[C
G]TTCTCCCAGC[CG][CG]TGCCTGC[CG]AGAGGC[CG][CG]
GGAC[CG]GGCA[CG][CG][CG][CG][CG]TTCCCAGGGGCCT
SEQ ID NO: 5299
GAG[CG]CA[CG]GG[CG][CG]G[CG]GGGAGGGTACTCACTGT
GAAGCA[CG]CTG[CG]CCCATGGATCATGTCTGTG[[CG]]TTA
CACCAGAGGCTC[CG]GGCTCCACTAATTCCATTTAGAGA[CG]G
GAAGACTTCCAGTGG[CG]GGGGGAGGACAGGGT[CG]AGAGGTG
TTAAAGA[CG]CAAAGCAAGAAGGAAATAAAGGGGGGC[CG]AGA
GGGAGAC[CG]AGAGGAAGGGGGAGCTC[CG]AGCCCA[CG]CTG
CAGCCAGATC[CG]GATGAGTC[CG]TCCTC[CG]CCC[CG]GG[
CG]GGCTCT[CG]CTCT[CG]CTGGCCCTCAG[CG]C[CG][CG]
CAGCCAGCAGCATCCCCAC[CG]TGA[CG]CT[CG]CATCACACC
[CG]GG[CG]C[CG]GC[CG]CCACCATC[CG][CG]C[CG]C[C
G]C[CG]TCAGGACCCTCCTCC[CG]GGCAT[CG]T[CG]C[CG]
C[CG][CG]GGGT[CG]GGAGGA[CG][CG]G[CG][CG][CG]G
GAGG[CG]G[CG]GT[CG]CAGGG[CG]AGCCC[CG]GGA[CG]C
CC[CG]AGC[CG]GGGC[CG]GGGC[CG]GGGAGAGGG[CG]CAG
[CG]AGGTGGGGGCCAGTCCAGAC[CG]A[CG]GCAG[CG]A[[C
G]]GAG[CG]GG[CG]G[CG]G[CG]G[CG]G[CG]C[CG]G[CG
]G[CG]G[CG]GGGTGGCTCAGTCCCCAGTCTCAGA
SEQ ID NO: 5300
GCTCTTAAATTAGCCCCCAAGAATTCTCTCCAGCCCTATAGAAAT
GTCTTACCTGCATGTGTCCCTGGTACATTCTGCTT[CG]GTTTCT
TCAGGGCTCCCTGAGGCCAC[CG]GATGCTTTTCCCC[CG]TGCT
TACTTGCCCACCAAAAGAGGGGAAAAGGTGGGTGCACAG[CG]GG
TTCTCAGAGGGTGCTCCTGAGCCCCCTGGAGCTC[CG]GGTACT[
CG]GC[[CG]]GC[CG]G[CG]GCCACT[CG]GCAG[CG]CTG[C
G]GGCTGC[CG]GGAACTGTTCTC[CG]CT[CG]GGGTGCTGAAA
G[CG]GA[[CG]][CG]GGAGAG[CG][[CG]]CAGAGAAGG[CG
]AGGAGC[CG]GGT[CG]GCCAGGCTCTCCTGCAGG[CG][CG]G
GTCCTGCT[CG][CG]GGG[CG]TCTCTAGAACTCACTCCTTCTT
[CG]C[CG]AACTCTTTCT[CG]CTTCCTGCCAGGTTGCCTCATG
TCTCTCTCTCTCTGAGCTG[CG]AACCCCCTCCTCCCAGCCCTGA
[CG]TGAG[CG]CCTACACCAGC[CG]C[CG]C[CG]CAGCTGC[
CG]AG[CG]GGG[CG][CG][CG]C[CG]TTCTCCCAGC[CG][C
G]TGCCTGC[CG]AGAGGC[CG][CG]GGAC[CG]GGCA[CG][C
G][CG][CG][CG]TTCCCAGGGGCCTGGGAG[CG]GCC
SEQ ID NO: 5301
AGG[[CG]]TCCTCAC[CG]TCTACCCTGTTGGGGT[CG]CTCTC
TGACCCC[CG][CG]CTGCATCCC[CG]GGAC[CG]ACCCACCTG
CTG[CG]CAGCTACCCCAGGC[CG]GTCCCAGC[CG]CC[CG]GA
GCCCCAGTG[CG][CG]ATGG[CG]GC[[CG]]GCAAACTG[CG]
CCTG[CG]CACTGGGCCTCAC[CG][CG]GACTA[CG]ACTCCCA
CAATGC[CG][CG]AGGCTGTGC[CG][CG]CAC[CG]GGG[CG]
AGCAAGGGAGC[CG]TGACAGGTGACAGTG[CG]CATGGCCAATC
AGA[CG][CG]AGTGTGGCCTCC[CG]G[CG]TCC[CG]CCCACT
C[CG]G[[CG]]CCTG[CG]TCATTTTGGGCACCATGGCAA[CG]
AAGTAAACAAG[[CG]]GGTAAATAATAGACCCCTGACAGCCAGA
GACC[CG]GAGAAACAAAGA[CG]GTGAGAAA[CG]GAGAAACAA
AGACAAAAAGA[CG][CG]CAGAC[CG]GGAGGGAGAGAAGCATG
AAGGCCCACAGA[CG]CT[CG]GGGGCAGACCAAGA[CG]CCCTG
GGGTCCC[[CG]]AAACAGAGATGTACAGAGT[[CG]]GACA[[C
G]]GAAAGGGAGAGACCAGCTCA[CG]GTTAAGAAAGGAGGGAGA
CCAGCCCAGGATCAAGAAAGGGAAAGACCAGCATGGGCTCA
SEQ ID NO: 5302
TGGGGCCCTC[CG]CTG[CG]CACT[CG]GCCCTG[[CG]]C[CG
]AGCACCCTGCAGCCTCCTCC[CG][CG]ACA[CG]G[CG]CTTT
GAACT[CG]G[CG]GATTGATTTTGCTTCCCTTCCCCCTTTTGTG
TGTGTTTG[CG]TTCAATTGGTTAGGTTTTTAAGATTTGGGAGGG
CTGGTGTGAAAGAATTAAAATACTCTTAACTGGAGCCCCTC[CG]
C[CG]AGAACTGGAGGTCC[CG]CCTCCTAGTT[CG]G[CG]CTT
TCAGGACCCTCTTCCCAGAGGGAATTTCTTTCAGAAATTCCAGGG
GGGCTTGTAAAAGA[CG]CTTC[CG]CAGAGCAGGTCC[CG]TCA
GGGTCTTTTTCCTGTTCCTGGTGCCAG[CG]GT[CG]GCC[CG]G
G[CG]CCC[CG]CAGACCT[CG]G[CG]AGGTAGATGTTAAGCT[
CG]GAGAGTGCCCCTCC[[CG]]CAGG[CG]C[CG]TGG[CG]AG
ATCACTCTGAATATGTAACATATTTGTAA[CG]TG[CG]C[CG]A
GGTGTGATGTGTGTGCTGAAATAGGGGGATGGGGGAATT[CG]AA
GC[CG]GATTGGGAAGG[CG]GGGGGGAGG[CG]CACAGAACTCA
CAATGTACTT[CG]CAATCTAACAATCTGAACATTCATTTATTAA
AAGCTGCT
SEQ ID NO: 5303
CCACTGAGG[CG]TCCTCAC[CG]TCTACCCTGTTGGGGT[CG]C
TCTCTGACCCC[CG][CG]CTGCATCCC[CG]GGAC[CG]ACCCA
CCTGCTG[CG]CAGCTACCCCAGGC[CG]GTCCCAGC[CG]CC[C
G]GAGCCCCAGTG[CG][CG]ATGG[CG]GC[CG]GCAAACTG[C
G]CCTG[CG]CACTGGGCCTCAC[CG][CG]GACTA[CG]ACTCC
CACAATGC[CG][CG]AGGCTGTGC[CG][CG]CAC[CG]GGG[C
G]AGCAAGGGAGC[CG]TGACAGGTGACAGTG[CG]CATGGCCAA
TCAGA[CG][CG]AGTGTGGCCTCC[[CG]]G[CG]TCC[CG]CC
CACTC[CG]G[CG]CCTG[CG]TCATTTTGGGCACCATGGCAA[[
CG]]AAGTAAACAAG[[CG]]GGTAAATAATAGACCCCTGACAGC
CAGAGACC[CG]GAGAAACAAAGA[CG]GTGAGAAA[CG]GAGAA
ACAAAGACAAAAAGA[CG][CG]CAGAC[CG]GGAGGGAGAGAAG
CATGAAGGCCCACAGA[CG]CT[CG]GGGGCAGACCAAGA[CG]C
CCTGGGGTCCC[[CG]]AAACAGAGATGTACAGAGT[[CG]]GAC
A[[CG]]GAAAGGGAGAGACCAGCTCA[CG]GTTAAGAAAGGAGG
GAGACCAGCCCAGGATCAAGAAAGGGAAAGACCAGCATG
SEQ ID NO: 5304
AGGCAGATGGGCAGCAGCAGCCTGAAGATGAGCC[CG]CACACCA
CTTCTGAGGCCAT[CG][CG]T[CG]GTC[CG]G[CG]AGT[CG]
GAGCAGAGGGG[CG]AGGCT[CG]AGGGTCCCTAGGGGTGGTGGG
A[CG]CAAGGCCCATGCC[CG]TCTATGGCCTCT[CG]C[CG]C[
CG]GCAGCT[CG]CAGCCACC[CG]AGCAT[CG]CCT[CG]G[CG
][CG]GGC[CG][CG]A[CG]CTCTC[CG]CCC[CG]AGGGCA[C
G]CTCC[CG]GGGCTCTTGGC[[CG]]CCCCT[CG]CCCAC[CG]
GGCTCTGGGTAGCCCCTCACCAGGCTCTTGG[CG]GCCACCTAGC
C[CG]G[CG]CC[CG]GCCCCCTG[CG]GC[CG]GCCCATTTAGT
GTGAATCCTGGATC[CG]GCAG[CG]G[CG]G[CG]GCTTCTTCA
GGGGTAGCTGATGC[CG]GGGCCTTGGAGAGGGA[CG]CTTTGGG
AGGGTCCTGGGAGG[CG]G[CG][CG]G[CG]AGCAAAGGGGGCA
AGAAGGG[CG]TGCTGTGCTCC[CG]CCTGGCTCC[CG]GGG[CG
]T[CG]TTTGGGGG[CG]GC[CG]GGGAGTTTTCTACTTGGAAGC
CCCTCTGAAGCCAC[CG][CG]TCTCCTTTGCC[CG]GCCT[CG]
TCTC[CG]CTGCCCA[CG]CAGGCTGC[CG][CG]CTCTGGCCT[
CG]GCC
SEQ ID NO: 5305
CCACACAGGGTG[CG]GG[CG]GGG[CG]GG[CG]GGGCTGGGGT
GT[CG]GGGGCT[CG]GATT[CG]GAGCCAGCTCTGC[CG]TGGG
G[CG]GGCTGGGGCAGGCTTCC[CG]CTCTGGGAAATTTGCCCCT
GCTCTCCCTGCCAGTTG[CG]GT[CG]TGGG[CG]GCCT[CG]CC
TTGGAGCCCTGGCCA[CG]GAGC[CG]CA[CG]GGG[CG]GTAGA
GAGGCTGGTGGGGAGGGACCAG[CG]GG[CG]GTGGAGGGG[CG]
GCCCTGCAGG[CG]A[CG][CG]GGGACTGGAAAGGG[CG]CCTG
GGTGGGAAGAGG[CG]CTGG[CG]GGTGAT[CG]TCCCCAC[[CG
]]GGCCAGTCCC[CG]GGATCTGCTGC[CG]CCCCTCTC[CG]AA
ATTCACAGCCAGAG[CG]GG[CG]CACTGGTGTGTGTGG[CG]CC
TGGAG[CG]CTAGGGTCCCCACCCAAGTG[CG]AGGCCCC[CG][
CG]GGGAGCCCAGCCCAGGGG[CG]TCCACAGTCCAGGCCCCAGA
CCCCAGGTCCTGGCTAGATT[CG]CCAAAGTCAGAGGCTGGAATC
TGGAGGG[CG]GATGTGAGGGTGCCAGCTAAGCCCAGCCCCTGCC
[CG]G[CG]GTGGCCAGCATAA[CG][CG]GTGACACTCTCTGGA
GCCCCCACTGCCACCACTC
SEQ ID NO: 5306
CAGCTCAATGTGAG[CG]AGCTGA[CG]C[CG]TCCAGCCATGCC
AGTG[CG]CTC[CG]GCAGCAGTA[CG][CG]CAGCAGTC[CG][
CG]CAGCAGT[CG]G[CG]TC[CG]CCTCCCAGTACCACCAGTGC
CACAGCCTGCAGCC[CG]C[CG]CCAGCCCCA[CG]GGCAGCCT[
CG]GCAGTCTGGGCTC[CG]GGCCCC[CG]CTCT[CG]CACCACC
ACCACCACC[CG]CACC[CG]G[CG]CACCACCAGCACCACCAGC
CCCAGG[CG][CG]C[CG][[CG]]AGAGCAACCCCTTCAC[CG]
AAATAGCCATGAGCAGCTGCAGGTACAA[CG]GGGG[CG]TCATG
[[CG]]GC[CG]CTCAGCAACTTGAG[CG][CG]TCC[CG]C[CG
]GAACCTGCA[CG]AGATGGACTCAGAGG[CG]CAGCCCCTGCAG
CCCCC[CG][CG]TCTGT[CG]GAGGAGGTGG[CG]G[CG][CG]
TCCTCCC[CG]TCTGCAGC[CG]CTGC[CG]C[CG]C[CG]C[CG
]CTGTTT[CG]TCCTCAGCCCC[[CG]]AGAT[CG]TGGTGTCTA
AGCC[CG]AGCACAACAACTCCAACAACCTGG[CG]CTCTATGGA
AC[CG]G[CG]G[CG]GAGGCAGCACTGGAGGAGG[CG]G[CG]G
[CG]GTGG[CG]GGAG[[CG]]GGCA[[CG]]GCAGCAGCAGTGG
CACCAAGTCCAGCAAA
SEQ ID NO: 5307
GGCTTCACTACTAG[[CG]]TGGTGC[CG]C[CG]CTGCTGGCCA
ACCTG[CG][CG]GACCAG[CG]CTCTGGCTGC[CG][[CG]]CA
GCCACTGCA[CG]GCCCAGCTGTG[CG]CAT[CG]CTGGCTCTGG
GTTC[CG]C[CG]AATG[CG]TCCTCCTGG[CG]GTGATGGCTCT
GGAC[CG][CG][CG]GC[CG]CAGTGTGC[CG]CC[CG]CTG[C
G]CTATG[CG]GGGCT[CG]TCTCCC[CG][CG]CCTATGT[CG]
CA[CG]CTGGCCAG[CG]CCTCCTGGCTAAG[CG]GCCTCACCAA
CT[CG]GTTG[CG]CAAAC[CG][CG]CTCCTGGCTGAG[[CG]]
GC[CG]CTGTG[CG][CG]CCC[CG]CCTGCTGGACCACTTCATC
TGTGAGCTGC[CG]G[CG]TTGCTCAAGCTGGCCTG[CG]GAGG[
CG]A[[CG]]GAGACACTAC[CG]AGAACCAGATGTT[CG]C[CG
]CC[[CG]][[CG]]TGGTCATCCTGCTGCTGC[CG]TTTGC[CG
]TCATCCTGGCCTCCTA[CG]GTGC[CG]TGGCC[CG]AGCTGTC
TGTTGCATG[CG]GTTCAG[CG]GAGGC[[CG]]GAGGAGGG[CG
]GTGGGCA[CG]TGTGGGTCCCACCTGACAGC[CG]TCTGCCTGT
TCTA[[CG]]GCT[[CG]]GCCATCTACACCTACCTGCAGCC[CG
][CG]CAG[[CG]]CTACAACCAGGCA[[CG]]G
SEQ ID NO: 5308
AGGAGGGGGAGGGGAGGCCAGGC[CG]GGC[CG]GGC[CG]GGC[
CG]GGTG[CG]GGGGGTC[CG]GGGATCTTCCTGAGGCCCTGG[C
G]GGG[CG]AGTTTCCAGCAG[CG][CG][CG]TCTGTGTGGAGT
C[CG]TTTTGCTGCC[CG]GGGCCTGGGGAAGGC[CG]TTT[CG]
GGGCTGG[CG]GGGGCAGGCTTTG[CG]GGGCATCCCTAGTCTGA
GAGGAGGG[CG]GGGCCCAA[CG]CCCAGCTGGACAGGAGCTGCT
C[CG]A[CG]GCCCCTGAGGGAA[CG][CG][CG]CCC[CG]CCC
CTGGCCCCACCTCTGCCCCACAC[CG]GGCACTGGGC[CG]CCAC
CTTTGTTGATGGAAGAGAGAAACTGAGGCATAGTGCCCAGGGCCA
GGGGAC[[CG]]CAACCACC[CG]GCCCTTGTCACTGTAG[CG]T
TAAGGCTCAGAGTCTG[CG]CAGCAGATATGTGTC[CG]CACC[C
G]CCAGGCCTTCAGCTTCCCTCAGACAGG[CG]GGAAAACCCTAG
GCTGCCCTTCTC[CG]AG[CG]GAGGGC[CG]CCCCACACACAGC
AGG[CG]CTTAAA[CG]GGTA[CG][CG]GGGCCCTGGA[CG]GC
TCTC[CG][CG]GAGCTCCCCAGGCTCTGG[CG]CAGTTCCC[CG
]GCTTGGGGACCTGAGCAC
SEQ ID NO: 5309
ATGCAGTTCATTTAGTTAACAAGTGAAATAATGAGGAAG[[CG]]
TGCAGAGTGAATGCCAAGAGAAAAGGCACAAAAACCCTATTGAGA
GGCCC[CG]GC[CG]CTCCTGG[CG]TAGTCCATCACATGGCAAT
AGTCCTATTTAAGC[[CG]][[CG]]C[CG]C[CG]G[CG]CCTT
TCAGCACCACTAG[CG]CTGGCCAGCACCC[CG][CG]CTCTTTG
GG[CG]GTGCCCA[CG]GCAGCAGAGGCTACTGTTTCAGCCTAGG
TCTCAGC[CG][CG][CG]TTCAGCCTCCTGGGCAGAGGCAGCTG
[CG]GGATAC[CG][CG]GCCAGGGAAAG[CG][[CG]]TGGAGA
GC[CG]AAAGGTG[CG]GTGGG[CG]CAGAGGG[CG]GGCTGGCT
G[CG]GGG[CG]AC[CG][CG][CG]C[CG]GGGCCATGC[CG][
CG]CTCCTTCCTGGTGGACT[CG]CTAGTGCTG[CG][CG]AGG[
CG]GG[CG]AGAAGAAGG[CG]CC[CG]AGGGCAGCC[CG]C[CG
]C[CG]CTCTTCCCCTA[CG]CTGTGCCCC[CG]C[CG]CA[CG]
[CG]CTGCA[CG]GTCTCT[CG]CCTGG[CG]CCTGCCA[CG][C
G][CG]CAAGGCTGGGCTGCTGTG[CG]TGTGCC[CG]CTCTG[C
G]TCAC[CG]CCT[CG]CAGCTGCATGGGCCCCC[CG]GGC[CG]
CC[CG][CG]CTGCCT
SEQ ID NO: 5310
GATCTTCCTGAGGCCCTGG[CG]GGG[CG]AGTTTCCAGCAG[[C
G]][CG][CG]TCTGTGTGGAGTC[CG]TTTTGCTGCC[CG]GGG
CCTGGGGAAGGC[CG]TTT[CG]GGGCTGG[CG]GGGGCAGGCTT
TG[CG]GGGCATCCCTAGTCTGAGAGGAGGG[CG]GGGCCCAA[C
G]CCCAGCTGGACAGGAGCTGCTC[CG]A[CG]GCCCCTGAGGGA
A[CG][CG][CG]CCC[CG]CCCCTGGCCCCACCTCTGCCCCACA
C[CG]GGCACTGGGC[[CG]]CCACCTTTGTTGATGGAAGAGAGA
AACTGAGGCATAGTGCCCAGGGCCAGGGGAC[[CG]]CAACCACC
[CG]GCCCTTGTCACTGTAG[CG]TTAAGGCTCAGAGTCTG[CG]
CAGCAGATATGTGTC[CG]CACC[CG]CCAGGCCTTCAGCTTCCC
TCAGACAGG[CG]GGAAAACCCTAGGCTGCCCTTCTC[CG]AG[C
G]GAGGGC[CG]CCCCACACACAGCAGG[CG]CTTAAA[CG]GGT
A[CG][CG]GGGCCCTGGA[CG]GCTCTC[CG][CG]GAGCTCCC
CAGGCTCTGG[CG]CAGTTCCC[CG]GCTTGGGGACCTGAGCAC[
CG]CCTCTGCCTGCCCCAGCTGCTCACCTCCCCTTTCCCACAGAG
CAGGGCCAGC[CG]T
SEQ ID NO: 5311
TTGGGGT[CG]CTCTCTGACCCC[CG][CG]CTGCATCCC[CG]G
GAC[CG]ACCCACCTGCTG[CG]CAGCTACCCCAGGC[CG]GTCC
CAGC[CG]CC[CG]GAGCCCCAGTG[CG][CG]ATGG[CG]GC[[
CG]]GCAAACTG[CG]CCTG[[CG]]CACTGGGCCTCAC[CG][C
G]GACTA[CG]ACTCCCACAATGC[CG][CG]AGGCTGTGC[CG]
[CG]CAC[CG]GGG[CG]AGCAAGGGAGC[CG]TGACAGGTGACA
GTG[CG]CATGGCCAATCAGA[CG][CG]AGTGTGGCCTCC[[CG
]]G[CG]TCC[CG]CCCACTC[CG]G[[CG]]CCTG[CG]TCATT
TTGGGCACCATGGCAA[CG]AAGTAAACAAG[[CG]]GGTAAATA
ATAGACCCCTGACAGCCAGAGACC[CG]GAGAAACAAAGA[CG]G
TGAGAAA[CG]GAGAAACAAAGACAAAAAGA[CG][CG]CAGAC[
CG]GGAGGGAGAGAAGCATGAAGGCCCACAGA[CG]CT[CG]GGG
GCAGACCAAGA[CG]CCCTGGGGTCCC[[CG]]AAACAGAGATGT
ACAGAGT[[CG]]GACA[[CG]]GAAAGGGAGAGACCAGCTCA[C
G]GTTAAGAAAGGAGGGAGACCAGCCCAGGATCAAGAAAGGGAAA
GACCAGCATGGGCTCAAGAAAAGAAAGAGACCAGCTCAG
SEQ ID NO: 5312
CTGACCCC[CG][CG]CTGCATCCC[CG]GGAC[CG]ACCCACCT
GCTG[CG]CAGCTACCCCAGGC[CG]GTCCCAGC[CG]CC[CG]G
AGCCCCAGTG[CG][CG]ATGG[CG]GC[CG]GCAAACTG[CG]C
CTG[CG]CACTGGGCCTCAC[CG][CG]GACTA[CG]ACTCCCAC
AATGC[CG][CG]AGGCTGTGC[CG][CG]CAC[CG]GGG[CG]A
GCAAGGGAGC[CG]TGACAGGTGACAGTG[CG]CATGGCCAATCA
GA[CG][CG]AGTGTGGCCTCC[[CG]]G[CG]TCC[CG]CCCAC
TC[CG]G[[CG]]CCTG[[CG]]TCATTTTGGGCACCATGGCAA[
[CG]]AAGTAAACAAG[[CG]]GGTAAATAATAGACCCCTGACAG
CCAGAGACC[CG]GAGAAACAAAGA[CG]GTGAGAAA[CG]GAGA
AACAAAGACAAAAAGA[CG][CG]CAGAC[CG]GGAGGGAGAGAA
GCATGAAGGCCCACAGA[CG]CT[CG]GGGGCAGACCAAGA[CG]
CCCTGGGGTCCC[[CG]]AAACAGAGATGTACAGAGT[[CG]]GA
CA[[CG]]GAAAGGGAGAGACCAGCTCA[CG]GTTAAGAAAGGAG
GGAGACCAGCCCAGGATCAAGAAAGGGAAAGACCAGCATGGGCTC
AAGAAAAGAAAGAGACCAGCTCAGGCTCAGGAAAAGA
SEQ ID NO: 5313
GAGTCTGAAG[CG]CC[CG][CG]AGGAAG[CG]AG[CG]CCAG[
CG][CG]GGC[CG]C[CG]G[CG]ATGA[CG]GC[CG][CG]AAG
CAGGAGC[CG]CAGCCCACCC[CG]GGGGCCAGGG[CG]AGCCAG
G[CG]CAGC[CG]G[CG]GACCAGGTGAGAGT[CG]GCAGC[CG]
[CG]GCCAGGCCCTCC[CG]GGAGGGGTGGCTCCAGTG[CG][CG
]CTC[CG]CC[CG]CCTCC[CG]CTTCCCAGGCTGGGCTCC[CG]
[CG]CCTCCCTCTTCTCACCCTCCCC[CG]CCC[CG]CCCCAGTT
CCAGGCTCTCCTGCTTCTCCA[CG]GACTCTG[CG]GGAAGTTAG
AGCCTCTG[CG]TG[CG]CTC[CG]GGGCC[CG]G[CG]AGAGGA
TG[CG]CAAGGTGGAGAGC[[CG]][CG]GGGAAGGGGGCAGAGA
GGTAAAGGCTGAAGGTGCCC[CG]GGGAACCC[CG]G[CG]GG[C
G]GCCCAC[CG]AGGGAGGGAGAGG[CG]GC[CG]GGACCAAGGA
ATGGGGCCTCTTGGTTCCCCATTAA[[CG]]CA[CG]CTGAAGAA
ATCTGCTG[CG]CTCCTGA[CG]GC[CG]CTCAC[CG]GGTT[CG
]AGCCC[CG]TCCTCCTATAGC[CG]GGG[CG]CT[CG]CTGGCC
AAAG[CG]ACC[CG]AGCAGG[CG]AATGACCTTTAGG[CG]GA[
CG]GGGTTTTCCCT
SEQ ID NO: 5314
GACTGGAAC[CG][CG]GCC[CG]AGGTAACTGGAGGGCA[CG]G
[CG]GGGG[[CG]]GGG[[CG]]CTCATCCCAGG[CG]GCTTCTG
ATTGGCCT[CG]GC[CG]CCT[CG]TG[CG]TCACAGCCC[CG]C
CCCTGCC[CG]GGAGTCC[CG]CAG[CG]GTGACTTGTCAC[CG]
A[CG]CC[CG]G[CG]TGATCCAG[CG]GACCAATGG[CG]GC[C
G]CC[CG][CG]G[CG][CG]CAGGGTG[CG]GGGATGGGGTC[C
G]CC[CG][CG]G[CG]TTGGG[CG][CG]CT[CG]CCAGCCCAG
GGGT[CG]CCATGAC[CG]AGTGGCCCAGGCC[CG]AG[CG]AAG
CC[CG][CG][CG][CG]GTGAGTC[CG]C[CG][CG]GCCCATC
[CG]TCCCTC[CG]CC[CG]CCAGAG[CG]TCCAT[CG]GGA[CG
]CCCACC[CG]GGAGGGTCT[CG]G[CG]C[CG][CG]T[CG]G[
CG]GGAGCTGGCC[CG]GGAT[CG][CG]GTCCAGGGG[CG][CG
][CG]T[CG]GGGGAGG[CG]GGCC[CG]GGCC[CG]GGAGGGGG
[CG]GGC[CG]GGC[CG]GGGTTCCAGAGCCCAT[CG]GGAGTCC
TGAGGT[[CG]]C[CG]TAGGGGAGGGAAGGGGAAGGCTAGAGGC
CA[CG][CG]GGG[CG]GGGACTGGGGGGGCTGGGGC[CG]CCCC
TTC[CG]CAGGGACCC[CG]ACCCCTGTTGGCATC[CG]CCTGTC
[CG]TTT
SEQ ID NO: 5315
A[CG][CG]GGCTTCACTACTAG[CG]TGGTGC[[CG]]C[CG]C
TGCTGGCCAACCTG[CG][CG]GACCAG[CG]CTCTGGCTGC[CG
][CG]CAGCCACTGCA[CG]GCCCAGCTGTG[CG]CAT[CG]CTG
GCTCTGGGTTC[CG]C[CG]AATG[CG]TCCTCCTGG[CG]GTGA
TGGCTCTGGAC[CG][CG][CG]GC[CG]CAGTGTGC[CG]CC[C
G]CTG[CG]CTATG[CG]GGGCT[CG]TCTCCC[CG][CG]CCTA
TGT[CG]CA[CG]CTGGCCAG[CG]CCTCCTGGCTAAG[CG]GCC
TCACCAACT[CG]GTTG[CG]CAAAC[CG][CG]CTCCTGGCTGA
G[CG]GC[CG]CTGTG[CG][CG]CCC[CG]CCTGCTGGACCACT
TCATCTGTGAGCTGC[CG]G[CG]TTGCTCAAGCTGGCCTG[CG]
GAGG[CG]A[[CG]]GAGACACTAC[CG]AGAACCAGATGTT[[C
G]]C[CG]CC[CG][CG]TGGTCATCCTGCTGCTGC[CG]TTTGC
[CG]TCATCCTGGCCTCCTA[CG]GTGC[CG]TGGCC[CG]AGCT
GTCTGTTGCATG[CG]GTTCAG[CG]GAGGC[[CG]]GAGGAGGG
[CG]GTGGGCA[CG]TGTGGGTCCCACCTGACAGC[CG]TCTGCC
TGTTCTA[[CG]]GCT[[CG]]GCCATCTACACCTACCTGCAGCC
[CG][CG]CAG[CG]CTACAACCAGG
SEQ ID NO: 5316
[CG]G[CG]ATGA[CG]GC[CG][CG]AAGCAGGAGC[CG]CAGC
CCACCC[CG]GGGGCCAGGG[CG]AGCCAGG[CG]CAGC[CG]G[
CG]GACCAGGTGAGAGT[CG]GCAGC[CG][CG]GCCAGGCCCTC
C[CG]GGAGGGGTGGCTCCAGTG[CG][CG]CTC[CG]CC[CG]C
CTCC[CG]CTTCCCAGGCTGGGCTCC[CG][CG]CCTCCCTCTTC
TCACCCTCCCC[CG]CCC[CG]CCCCAGTTCCAGGCTCTCCTGCT
TCTCCA[CG]GACTCTG[CG]GGAAGTTAGAGCCTCTG[[CG]]T
G[CG]CTC[CG]GGGCC[CG]G[CG]AGAGGATG[CG]CAAGGTG
GAGAGC[[CG]][CG]GGGAAGGGGGCAGAGAGGTAAAGGCTGAA
GGTGCCC[CG]GGGAACCC[CG]G[CG]GG[CG]GCCCAC[CG]A
GGGAGGGAGAGG[CG]GC[CG]GGACCAAGGAATGGGGCCTCTTG
GTTCCCCATTAA[CG]CA[CG]CTGAAGAAATCTGCTG[CG]CTC
CTGA[CG]GC[CG]CTCAC[CG]GGTT[CG]AGCCC[CG]TCCTC
CTATAGC[CG]GGG[CG]CT[CG]CTGGCCAAAG[CG]ACC[CG]
AGCAGG[CG]AATGACCTTTAGG[CG]GA[CG]GGGTTTTCCCTC
TGCTTTCTTGTTTCTTTTGAGGAGA[CG]GGTGTGTGTTTGTGAG
SEQ ID NO: 5317
AGA[CG][CG]GGCTTCACTACTAG[CG]TGGTGC[CG]C[CG]C
TGCTGGCCAACCTG[CG][CG]GACCAG[CG]CTCTGGCTGC[CG
][[CG]]CAGCCACTGCA[CG]GCCCAGCTGTG[CG]CAT[CG]C
TGGCTCTGGGTTC[CG]C[CG]AATG[CG]TCCTCCTGG[CG]GT
GATGGCTCTGGAC[[CG]][CG][CG]GC[CG]CAGTGTGC[CG]
CC[CG]CTG[CG]CTATG[CG]GGGCT[CG]TCTCCC[CG][CG]
CCTATGT[CG]CA[CG]CTGGCCAG[CG]CCTCCTGGCTAAG[CG
]GCCTCACCAACT[CG]GTTG[CG]CAAAC[CG][CG]CTCCTGG
CTGAG[CG]GC[CG]CTGTG[CG][CG]CCC[CG]CCTGCTGGAC
CACTTCATCTGTGAGCTGC[CG]G[CG]TTGCTCAAGCTGGCCTG
[CG]GAGG[CG]A[[CG]]GAGACACTAC[CG]AGAACCAGATGT
T[CG]C[CG]CC[CG][[CG]]TGGTCATCCTGCTGCTGC[CG]T
TTGC[[CG]]TCATCCTGGCCTCCTA[CG]GTGC[CG]TGGCC[C
G]AGCTGTCTGTTGCATG[CG]GTTCAG[CG]GAGGC[[CG]]GA
GGAGGG[CG]GTGGGCA[CG]TGTGGGTCCCACCTGACAGC[CG]
TCTGCCTGTTCTA[[CG]]GCT[CG]GCCATCTACACCTACCTGC
AGCC[[CG]][[CG]]CAG[[CG]]CTACAACCA
SEQ ID NO: 5318
TGTGCTG[CG]CTGGC[CG]CCTGGACCAGGGTGGCTGCTGGAGA
GTGTTTTCCCTCTGGGTTTCCTTCTCCTTGGCTCCCAGGGAATCC
TCTGG[[CG]]GTGCCTC[CG]GGAGGCTGGTAGC[CG]GGGAAG
CAGGCA[[CG]]TGAATCCAC[CG]GGCTGCCCCACCCCAACCTG
AGGTCAGAGCTGAGG[CG]TAGGGGC[CG]GGGTAGGGGCAGAGG
TGC[CG]AAA[CG]CACTAGCTGGGGACTCC[CG]GGGGAAGGAG
ATAGGAGAGACCCAAGG[CG]AGCCTTAGGACT[CG]CCCCTATG
ACTATGACTA[CG][CG]CTG[[CG]]TC[CG]AACCACATGTCC
ACCC[CG]CATTTGCCTT[CG]GGGACCAGAC[CG][CG]CTCCC
TCAGATGGCTGGGGAGGGAGCAGACTC[CG]GGTGAAGGCTGGGG
GAGGTAC[CG]GGATGC[CG]AGTA[CG]CCAGAGCAGG[CG]GG
GGATGGGTTC[[CG]]GCTTCCTGC[CG]CCT[CG]GCATCT[CG
]CTTTGCAC[CG]GGCAAAGAAGGGGCCA[CG]AC[CG]G[CG]A
AGAG[CG][CG]TGGAGACACAGGGACC[CG][CG]ATCCAGGGG
CAGGAACCC[CG]CCCCCTCC[CG]GAAACCTCC[CG]GGCCCTG
AGT[CG]TGCC[CG]G[CG]CTC
SEQ ID NO: 5319
C[CG][CG][CG][CG]T[CG]GGGCTGCTCC[CG]GGAGGAAGG
[CG]G[CG][CG]GAGGC[CG]GGGG[CG]GC[CG]CTGAGCTTG
G[CG]TC[CG][CG][CG]GCTC[CG]GTG[CG]GGCTG[CG]C[
CG][CG]CCTTCCCCAG[CG]AGCTAC[CG]AGCTTGGGGC[CG]
C[CG][CG]GTC[CG]CTCC[CG]C[CG]CC[CG]GCCTCTCCCT
CCT[CG]GCCAC[CG]C[CG]CAGCCCCTGCCC[CG]C[CG]AGC
CC[CG]C[CG]GACAG[CG]G[CG]GC[CG]CAG[CG][CG]CAT
TTGGGCTC[CG]AGGAAGTTGAC[CG]AGG[CG]GCTGC[CG]CA
GGATCC[CG]GGCC[CG]GAT[CG]CA[CG]AAGCC[CG][CG][
[CG]]GC[CG]TCTCCTC[CG][CG][CG]CCACCCCTG[CG]CC
TCC[CG][CG]AGCTCCACTTCCCATCTGCTATTGTTTC[CG]AT
TGTTTTC[CG]GTGG[[CG]]AGCC[CG]GCTC[CG]AAACTTAC
AAAGTGTTGGATGTCCCC[CG]TT[CG]AACTGAGGGACTGCAGA
C[CG]CCTCTGGGTAGCTGGATGAAGCCCACCC[CG]TCCCCTTC
TGGTACCAAAGTGCTTACTCCTCTCCAAAGTGC[CG]TGTCTGAA
CTGC[CG]CTGGGAAGAAG[CG]GCTCCTGAGA[CG][CG]CCCA
CACCTTTCACCTGC[CG][CG][CG]CTTCCCCCTCCT
SEQ ID NO: 5320
C[CG]CC[CG]GCCTCTCCCTCCT[CG]GCCAC[CG]C[CG]CAG
CCCCTGCCC[CG]C[CG]AGCCC[CG]C[CG]GACAG[CG]G[CG
]GC[CG]CAG[CG][CG]CATTTGGGCTC[CG]AGGAAGTTGAC[
CG]AGG[CG]GCTGC[CG]CAGGATCC[CG]GGCC[CG]GAT[CG
]CA[CG]AAGCC[CG][CG][[CG]]GC[CG]TCTCCTC[CG][C
G][CG]CCACCCCTG[CG]CCTCC[CG][CG]AGCTCCACTTCCC
ATCTGCTATTGTTTC[CG]ATTGTTTTC[CG]GTGG[[CG]]AGC
C[CG]GCTC[CG]AAACTTACAAAGTGTTGGATGTCCCC[CG]TT
[CG]AACTGAGGGACTGCAGAC[CG]CCTCTGGGTAGCTGGATGA
AGCCCACCC[CG]TCCCCTTCTGGTACCAAAGTGCTTACTCCTCT
CCAAAGTGC[CG]TGTCTGAACTGC[CG]CTGGGAAGAAG[CG]G
CTCCTGAGA[CG][CG]CCCACACCTTTCACCTGC[CG][CG][C
G]CTTCCCCCTCCT[CG]GCCACCTTCC[CG]G[CG]GAAGCAG[
CG]AGGAGGGAGCCCCCTTTGGC[CG]TCCTC[CG]TGGAAC[CG
]GTTTTC[CG]AGGCTGGCAAAAGC[CG]AGGCTGGATTTGGGGG
AGGAATATTAGACT[CG]GAGGAGTCTG[CG][CG]CTTTTCTCC
TCCC
SEQ ID NO: 5321
GC[CG]CC[CG]GCAGGGAGAGG[CG]GAGTCACTGG[CG]CC[C
G]GGG[CG]GGGTGTTGGGGAGGGGTGAGTAGGGACAGGAGGGAG
GGGGTGGAGAGTTGGGCTGCTG[CG]A[CG]CCTCC[CG]GTGGC
TCTGG[CG]GCACCAATG[CG]GGGCAC[CG]GAGCAGGTGTC[C
G]ACTG[[CG]]GTG[CG]GGCTACCACTC[CG]C[CG]GGGAAC
CT[CG]TCTTGCTCCTCCCTG[CG]CTT[CG]CCTCTGGAATCTC
TCCCTTATCTCATGC[CG][CG]GTGAAACTTTGCTCAAGTTGGT
GGTGCTCTGAGGTCTCCAGGGCTGGAGGC[CG][CG][CG]A[CG
][CG]AAT[CG]C[CG]ACACTGGATTCT[CG]GG[CG]TTAGTC
[CG]AAGTTTAAGTTCCCTT[CG]TTCACTCCTTTGCCCTGGAT[
[CG]]AAC[CG]CAGCCCCAGGA[CG]CAG[CG]GGTTCCACTGG
AAA[CG]GGGAAT[CG]GGGAGAGG[CG]GT[CG]CTGGGCTC[C
G]GG[CG]ACCTGGGAA[CG]AGGG[CG]TTTGCTCCCCCTCC[C
G]AC[CG]AG[CG]GG[CG]GC[CG]G[CG]TCAGCAC[CG][CG
]GACAG[CG]CAT[CG]GTGC[CG]CAGC[CG][CG]GG[CG]GG
[CG]C[CG]CTAGGGCTGCCAGGGGTC[CG]AGG[CG][[CG]]G
GCAAGGCTGCTCAC
SEQ ID NO: 5322
GTGGAGAGTTGGGCTGCTG[CG]A[CG]CCTCC[CG]GTGGCTCT
GG[CG]GCACCAATG[CG]GGGCAC[CG]GAGCAGGTGTC[CG]A
CTG[[CG]]GTG[CG]GGCTACCACTC[CG]C[CG]GGGAACCT[
CG]TCTTGCTCCTCCCTG[CG]CTT[CG]CCTCTGGAATCTCTCC
CTTATCTCATGC[CG][CG]GTGAAACTTTGCTCAAGTTGGTGGT
GCTCTGAGGTCTCCAGGGCTGGAGGC[CG][CG][CG]A[CG][C
G]AAT[CG]C[CG]ACACTGGATTCT[CG]GG[CG]TTAGTC[CG
]AAGTTTAAGTTCCCTT[CG]TTCACTCCTTTGCCCTGGAT[[CG
]]AAC[CG]CAGCCCCAGGA[CG]CAG[CG]GGTTCCACTGGAAA
[CG]GGGAAT[CG]GGGAGAGG[CG]GT[CG]CTGGGCTC[CG]G
G[CG]ACCTGGGAA[CG]AGGG[CG]TTTGCTCCCCCTCC[CG]A
C[CG]AG[CG]GG[CG]GC[CG]G[CG]TCAGCAC[CG][CG]GA
CAG[CG]CAT[CG]GTGC[CG]CAGC[CG][CG]GG[CG]GG[CG
]C[CG]CTAGGGCTGCCAGGGGTC[CG]AGG[CG][CG]GGCAAG
GCTGCTCACCC[CG]CTGTGCTGTGCACCCCAAACCTTCCCTGTT
TTCCTTTCTACCTCC[CG]TGTGCACCCCCCTACC[CG]CCACC[
CG]AGGCA
SEQ ID NO: 5323
TG[CG]GGCTG[CG]C[CG][CG]CCTTCCCCAG[CG]AGCTAC[
CG]AGCTTGGGGC[CG]C[CG][CG]GTC[CG]CTCC[CG]C[CG
]CC[CG]GCCTCTCCCTCCT[CG]GCCAC[CG]C[CG]CAGCCCC
TGCCC[CG]C[CG]AGCCC[CG]C[CG]GACAG[CG]G[CG]GC[
CG]CAG[CG][CG]CATTTGGGCTC[CG]AGGAAGTTGAC[CG]A
GG[CG]GCTGC[CG]CAGGATCC[CG]GGCC[CG]GAT[CG]CA[
CG]AAGCC[CG][CG][[CG]]GC[CG]TCTCCTC[CG][CG][C
G]CCACCCCTG[CG]CCTCC[CG][CG]AGCTCCACTTCCCATCT
GCTATTGTTTC[CG]ATTGTTTTC[CG]GTGG[CG]AGCC[CG]G
CTC[CG]AAACTTACAAAGTGTTGGATGTCCCC[CG]TT[CG]AA
CTGAGGGACTGCAGAC[CG]CCTCTGGGTAGCTGGATGAAGCCCA
CCC[CG]TCCCCTTCTGGTACCAAAGTGCTTACTCCTCTCCAAAG
TGC[CG]TGTCTGAACTGC[CG]CTGGGAAGAAG[CG]GCTCCTG
AGA[CG][CG]CCCACACCTTTCACCTGC[CG][CG][CG]CTTC
CCCCTCCT[CG]GCCACCTTCC[CG]G[CG]GAAGCAG[CG]AGG
AGGGAGCCCCCTTTGGC[CG]TCCTC[CG]TGGAAC[CG]GTTTT
C[CG]AGGCTGGCAAAAG
SEQ ID NO: 5324
GCC[CG]AGCTGGG[CG]C[CG]TCCTAGAGCCAAG[CG]CC[CG
]CTAGAGC[CG]AGACTAGGGGG[CG]GTGAGGAGTGGGACC[CG
]CT[CG][CG]GCCATTGGTTGTG[CG]GCCAGGAGGGG[CG]GA
GGGA[CG]A[CG][CG][CG]GGCTGTG[CG]GGGC[CG]GCAGC
C[CG]GATCCACTCC[CG]CTG[CG]CCTGCTGTC[CG]C[CG]T
G[CG]CCCAGACTG[CG][CG]C[CG][CG]C[CG]CTG[CG]CC
CAACATTCC[CG]AGGA[CG]GCTT[CG][CG]GG[CG][CG]TA
T[CG]TCCAGAC[CG]GAGCAC[CG]CCCCAC[CG]CTAG[CG]C
AGGAGACCTGC[CG]GGGAAGT[CG][[CG]]TGTCCTGACCTGC
AGGTCAGTGAGGGAAACTTGCAGGGTCC[CG]AGCTCTGGGGGTG
AACTTGCCCTA[CG][CG]GAGAG[CG]CCCCACTCCTTGCCTGG
GG[CG]GCCT[CG]GGTCCTGGAGG[[CG]]AGC[CG]CCTCCCA
GACTCTCCCC[CG]AGATCTGGGCTCC[CG]GAGATGTGGCTCCT
TTCTGAGAAACACCCCCAAATCTATCCCTTTTGAGGTGTCCTTAC
TGTCC[CG]AGAAGCAAT[CG]CAGCC[CG]GCTCTC[CG]AGTC
TTGGGGTGACTCCA[CG]GGCTGCAGGAGGAGC[CG][CG]AGGG
GCCCTG
SEQ ID NO: 5325
GAGGGCAGGGC[CG]CAAGACTTCTGGGGTC[CG]AATAGGTCAG
GGGT[CG]GCAGCCCCAG[CG]GGTG[CG]TAGCCAGAGCTTGGA
CT[CG]GGGAAGAGGG[CG]AGAAT[CG]TGACCTCAAGAAGCTG
GGGGGGGGTGGGGTGGCCAGGGGGAAGGGAGGGGAGG[CG]GTGG
GGG[CG]CCCTTGTGGGTAGGTGGGATG[CG]AAGGGGAGGAGGG
GTCTAGAAC[CG]CCTG[CG]CCT[CG][CG]GTTTCCTGCAGGT
GAGCCC[CG]AGGGAG[CG]GGGGA[CG]AGGACT[CG]TGCTCC
TCCT[CG]GCCC[CG]CTGTCCC[CG]T[[CG]]TCCT[CG]CCC
[CG]GTCCATGGCCT[CG]GGCTC[CG]GCTGCCCTCCTGGCAAG
TGTGTGTGCAACAGTTG[CG]GCCTGGAGAT[[CG]]TGGACAAA
TACCTTCTCAAGGTAGGATAGGGCCT[CG]GGTG[CG]AGGCCCA
AGGGGAG[CG]GGCTTAG[CG]TGGGAGCTCTGGGAAAAGAGTAA
TGTTCCTCCCACCAACCTTTC[CG]TTCAAGTTCTGGGTGAAGGT
TGTAGGCTTTTGCAGAAAATCAGCCCAGTTTAGGGCAACTCATG[
CG]GTGGGATAAAGTGAGAAGAAATCCCAGACTCTTCTATGTC
SEQ ID NO: 5326
CAAGCAGCTGGTAGGAGAATCTGGGCTGGATT[CG]GAAGG[CG]
CAGCTACAGGA[CG]CC[CG]CTGCCC[CG]GAT[CG]GAAGG[C
G]CAGCACCTCAGGCCACAATCTCAGACA[CG]CCCT[CG]GGTC
C[CG]ACAGGTGTTGCC[CG]CCTCCCA[CG]GGGCTC[CG]GGA
CCC[CG]GTCCC[CG]GGCTGCCCCCTGCCTTCTGGGG[CG]CTG
GAG[CG][CG][CG]CAGTGG[CG]GAGCTGGAGCCACCCAGTGC
TT[CG]CA[CG]GG[CG][CG]CTC[CG]CTTCTC[CG]GGTTTT
AG[CG]GAAGCCTG[CG]GGGGG[CG]GGGTAAC[CG][CG]GAA
GC[[CG]]G[CG]GC[[CG]]TGGG[CG][CG][CG]GGTTGGGG
GCTCT[CG][CG]C[CG]CTC[CG]GGCTCTCCCCCCCCC[CG]G
CTG[CG]GTTGC[CG]AAGAGAGGC[CG]GAG[CG][CG]G[CG]
CC[CG]GCTGCTCCACCTGG[CG][CG]CTGAGCAC[CG][CG][
CG]GGGAGCCCC[CG]GGGG[CG]GG[CG]GTGGGGGG[CG][CG
]GACTG[CG]GGAAGAAGGCA[CG]AGG[CG]T[CG]C[CG]CAG
CT[CG]GTCAGGGGC[CG]GGGCCC[CG]C[CG]CT[CG]C[CG]
CTGCACTAACTTGC[CG]CTTGGTCT[CG]CCT[CG]C[CG]C[C
G][CG]GCT[CG]CTG[CG]CTTTGGGTGG[CG]GGGGG[CG]G
SEQ ID NO: 5327
GCAGCTGGTAGGAGAATCTGGGCTGGATT[CG]GAAGG[[CG]]C
AGCTACAGGA[CG]CC[CG]CTGCCC[CG]GAT[[CG]]GAAGG[
CG]CAGCACCTCAGGCCACAATCTCAGACA[CG]CCCT[CG]GGT
CC[CG]ACAGGTGTTGCC[CG]CCTCCCA[CG]GGGCTC[CG]GG
ACCC[CG]GTCCC[CG]GGCTGCCCCCTGCCTTCTGGGG[CG]CT
GGAG[CG][CG][CG]CAGTGG[CG]GAGCTGGAGCCACCCAGTG
CTT[CG]CA[CG]GG[CG][CG]CTC[CG]CTTCTC[CG]GGTTT
TAG[CG]GAAGCCTG[CG]GGGGG[CG]GGGTAAC[CG][CG]GA
AGC[[CG]]G[[CG]]GC[[CG]]TGGG[CG][CG][CG]GGTTG
GGGGCTCT[CG][CG]C[CG]CTC[CG]GGCTCTCCCCCCCCC[C
G]GCTG[CG]GTTGC[CG]AAGAGAGGC[CG]GAG[CG][CG]G[
CG]CC[CG]GCTGCTCCACCTGG[CG][CG]CTGAGCAC[CG][C
G][CG]GGGAGCCCC[CG]GGGG[CG]GG[CG]GTGGGGGG[CG]
[CG]GACTG[CG]GGAAGAAGGCA[CG]AGG[CG]T[CG]C[CG]
CAGCT[CG]GTCAGGGGC[CG]GGGCCC[CG]C[CG]CT[CG]C[
CG]CTGCACTAACTTGC[CG]CTTGGTCT[CG]CCT[CG]C[CG]
C[CG][CG]GCT[CG]CTG[CG]CTTTGGGTGG[CG]GGGGG[CG
]GGGA
SEQ ID NO: 5328
TCCCTGCAGC[CG]GTCCTCTT[CG]CCCTTGTCCTCCTGTGCTA
CCTCCTGACCTTGA[CG]GGCAACT[CG]G[CG]CTGGTGCTGCT
GG[[CG]]GTG[[CG]][CG]ACC[CG][CG]CCTGCACA[CG]C
CCATGTACTACTTCCTCTGCCACCTGGCCTTGGTAGA[CG][CG]
GGCTTCACTACTAG[[CG]]TGGTGC[CG]C[CG]CTGCTGGCCA
ACCTG[CG][CG]GACCAG[CG]CTCTGGCTGC[CG][[CG]]CA
GCCACTGCA[CG]GCCCAGCTGTG[CG]CAT[CG]CTGGCTCTGG
GTTC[CG]C[CG]AATG[CG]TCCTCCTGG[CG]GTGATGGCTCT
GGAC[[CG]][CG][CG]GC[CG]CAGTGTGC[CG]CC[CG]CTG
[CG]CTATG[CG]GGGCT[CG]TCTCCC[CG][CG]CCTATGT[C
G]CA[[CG]]CTGGCCAG[CG]CCTCCTGGCTAAG[CG]GCCTCA
CCAACT[CG]GTTG[CG]CAAAC[CG][CG]CTCCTGGCTGAG[C
G]GC[CG]CTGTG[[CG]][[CG]]CCC[[CG]]CCTGCTGGACC
ACTTCATCTGTGAGCTGC[CG]G[CG]TTGCTCAAGCTGGCCTG[
CG]GAGG[CG]A[[CG]]GAGACACTAC[CG]AGAACCAGATGTT
[[CG]][[CG]]CC[[CG]][[CG]]TGGTCATCCTGCTGCTGC[
[CG]]TTTGC[[CG]]TCATCCTGGCCTCCTA[CG]GTGCC
SEQ ID NO: 5329
AGAAGGAGCACTGCTGTC[CG]CCCCAAGAA[CG]GGGTCTGTC[
CG]CC[CG]AGCTCTAAGG[CG]AGCATCTTCAGGGGGACAGTTT
CTG[CG]AAGG[CG]GGGAGAGGAGTCCCTCCCCAACTTCACTCC
CCTAATCAAGC[CG][CG]GGTGAGATAGGCAGC[CG]G[CG]GT
TTGTGCCCATCTGTGGGGGCAAGTCCTACCTTCTGCCAAAAGG[C
G][CG]A[CG]CATGCACAAAAGATGGATCCAGGCTATCTTTCTC
TGCCATCAGCTCAGGCAAATATTTCTCCTCTTCCATAG[CG][CG
]GACTT[CG]GATTGTCCC[[CG]]GG[CG]AAG[CG][CG]AGG
TTC[CG]CT[CG]CT[CG]GA[CG]CAGGCAGGGTCTTGGGGCAG
[CG]CCTGGCTCC[CG][CG]CTGCTCCTCCTC[CG][CG][CG]
G[CG]AGGGATCTCTGTG[CG]TCCTCACTGGCCCATGCACCCAG
CACCTG[CG]ACTCC[CG]C[CG]T[CG]GGCTG[CG]TGGCCC[
CG][CG]CCCACACCTGCC[CG]TCCCTTC[CG]T[CG]TCCCT[
CG]CT[CG][CG]CAGAGCCC[CG]GCTCACACCAG[CG]GCCTT
AACTGGAGAGG[[CG]]GGAACAGGA[CG][CG]GCCCACCTC[C
G]CCAACCACTCATTGGTGGTGGTGCCAGGAGA
SEQ ID NO: 5330
[CG]CAAGACTTCTGGGGTC[CG]AATAGGTCAGGGGT[CG]GCA
GCCCCAG[CG]GGTG[CG]TAGCCAGAGCTTGGACT[CG]GGGAA
GAGGG[CG]AGAAT[CG]TGACCTCAAGAAGCTGGGGGTGGGGTG
GGGTGGCCAGGGGGAAGGGAGGGGAGG[CG]GTGGGGG[CG]CCC
TTGTGGGTAGGTGGGATG[CG]AAGGGGAGGAGGGGTCTAGAAC[
CG]CCTG[CG]CCT[CG][CG]GTTTCCTGCAGGTGAGCCC[CG]
AGGGAG[CG]GGGGA[CG]AGGACT[CG]TGCTCCTCCT[CG]GC
CC[CG]CTGTCCC[CG]T[CG]TCCT[CG]CCC[[CG]]GTCCAT
GGCCT[CG]GGCTC[CG]GCTGCCCTCCTGGCAAGTGTGTGTGCA
ACAGTTG[CG]GCCTGGAGAT[[CG]]TGGACAAATACCTTCTCA
AGGTAGGATAGGGCCT[CG]GGTG[CG]AGGCCCAAGGGGAG[CG
]GGCTTAG[CG]TGGGAGCTCTGGGAAAAGAGTAATGTTCCTCCC
ACCAACCTTTC[CG]TTCAAGTTCTGGGTGAAGGTTGTAGGCTTT
TGCAGAAAATCAGCCCAGTTTAGGGCAACTCATG[CG]GTGGGAT
AAAGTGAGAAGAAATCCCAGACTCTTCTATGT[CG]TTGCAAAAC
A
SEQ ID NO: 5331
G[CG]GTCACACACCTGCAGGAACA[CG][CG]CACACTACACAC
[CG]TTGCTCT[CG]CCTCC[CG]GTATCACCTT[CG]AA[CG][
CG]CTGGC[CG]GCCCCCTCCTAGCCTGGTGCAGT[CG]GCTC[[
CG]]CTTCTACTCAGTCT[CG]GGTCCTCCTGGGCCAA[CG]CAG
ACCCTGGTGCCTCCTTCCTTAGA[CG]AGCTAAGGTCAAGACTTC
TGCTGCTG[CG]GAGGAGCC[CG][[CG]]CACCAGGC[CG]GGG
TGGACTG[CG]CCTG[CG]CAT[CG]GGCC[CG]CCTGGTTCTTA
GGAACTA[CG]ACTCCCAGGGGG[CG]CTG[CG][CG]CT[[CG]
][[CG]]GCAC[CG][CG]ACTAAAGCTTGCAAAGCCTGGGTCAT
[[CG]]AAACTACAACTCCCAGAAGGCTAAG[[CG]]TCTGCACA
[CG]CTAGGTC[CG]CAGGG[CG]CTGACCCCTGGGGGCC[CG]A
GGAG[CG]C[CG]GGCTGCTGCCC[CG]AGCCC[CG]CCCACTAC
AGCCTCAGTGCATGG[CG]GTGGG[CG]CTTCCAGTAACTCAGGG
GTGGGACTTTTTTCTTGCTCAGGGGATGAGGC[CG]AGCCCACAG
GCTTAGAAAGAAGGAACTTGAGTC[CG]GGCACCTGTCATCCCAG
[CG]CTTAGGGAGGC[CG]AGG[CG]GGTGGA
SEQ ID NO: 5332
CTGGTAGGAGAATCTGGGCTGGATT[CG]GAAGG[CG]CAGCTAC
AGGA[CG]CC[CG]CTGCCC[CG]GAT[[CG]]GAAGG[CG]CAG
CACCTCAGGCCACAATCTCAGACA[CG]CCCT[CG]GGTCC[CG]
ACAGGTGTTGCC[CG]CCTCCCA[CG]GGGCTC[CG]GGACCC[C
G]GTCCC[CG]GGCTGCCCCCTGCCTTCTGGGG[CG]CTGGAG[C
G][CG][CG]CAGTGG[CG]GAGCTGGAGCCACCCAGTGCTT[CG
]CA[CG]GG[CG][CG]CTC[CG]CTTCTC[CG]GGTTTTAG[CG
]GAAGCCTG[CG]GGGGG[CG]GGGTAAC[CG][CG]GAAGC[[C
G]]G[[CG]]GC[CG]TGGG[CG][CG][CG]GGTTGGGGGCTCT
[CG][CG]C[CG]CTC[CG]GGCTCTCCCCCCCCC[CG]GCTG[C
G]GTTGC[CG]AAGAGAGGC[CG]GAG[CG][CG]G[CG]CC[CG
]GCTGCTCCACCTGG[CG][CG]CTGAGCAC[CG][CG][CG]GG
GAGCCCC[CG]GGGG[CG]GG[CG]GTGGGGGG[CG][CG]GACT
G[CG]GGAAGAAGGCA[CG]AGG[CG]T[CG]C[CG]CAGCT[CG
]GTCAGGGGC[CG]GGGCCC[CG]C[CG]CT[CG]C[CG]CTGCA
CTAACTTGC[CG]CTTGGTCT[CG]CCT[CG]C[CG]C[CG][CG
]GCT[CG]CTG[CG]CTTTGGGTGG[CG]GGGGG[CG]GGGAGAG
C
SEQ ID NO: 5333
ACACCTGCAGGAACA[CG][CG]CACACTACACAC[CG]TTGCTC
T[CG]CCTCC[CG]GTATCACCTT[CG]AA[CG][CG]CTGGC[C
G]GCCCCCTCCTAGCCTGGTGCAGT[CG]GCTC[CG]CTTCTACT
CAGTCT[CG]GGTCCTCCTGGGCCAA[CG]CAGACCCTGGTGCCT
CCTTCCTTAGA[CG]AGCTAAGGTCAAGACTTCTGCTGCTG[CG]
GAGGAGCC[CG][CG]CACCAGGC[CG]GGGTGGACTG[CG]CCT
G[CG]CAT[CG]GGCC[CG]CCTGGTTCTTAGGAACTA[CG]ACT
CCCAGGGGG[CG]CTG[CG][CG]CT[[CG]]C[CG]GCAC[CG]
[CG]ACTAAAGCTTGCAAAGCCTGGGTCAT[[CG]]AAACTACAA
CTCCCAGAAGGCTAAG[CG]TCTGCACA[CG]CTAGGTC[CG]CA
GGG[CG]CTGACCCCTGGGGGCC[CG]AGGAG[CG]C[CG]GGCT
GCTGCCC[CG]AGCCC[CG]CCCACTACAGCCTCAGTGCATGG[C
G]GTGGG[CG]CTTCCAGTAACTCAGGGGTGGGACTTTTTTCTTG
CTCAGGGGATGAGGC[CG]AGCCCACAGGCTTAGAAAGAAGGAAC
TTGAGTC[CG]GGCACCTGTCATCCCAG[CG]CTTAGGGAGGC[C
G]AGG[CG]GGTGGATCACCTGA
SEQ ID NO: 5334
GAAGGGGTGTGGAGGAGCCAGATGGGAAGAGAAGCAG[CG]GGA[
CG]AGGG[CG]AGGAAGGGCTGGAGATTGTTAGAGGACAGATGGG
G[CG]GGACTGGGGAGAGGGG[[CG]]AAGG[CG]A[CG][CG]C
[CG]AGGCACTCCTC[CG]CCCCATGAGCACAGACAGTAACTC[C
G]AAA[CG][CG]CAGATGGGC[CG]TAAGGTAAAGAGGCCTTTT
TTCCCTCTCCTCTC[CG]TCCTCTACCCTGCTCCCCTCCTAGACA
CTTGGTGAAAAAGCAAGGTG[CG]GTGTACCTGGAG[CG]AACAC
CATGATTTCTTCCAGC[CG]CTA[CG]CCCCCAGATTAAGAGAGA
AAGACAGGCAGA[CG]GAGGATGGGAAGAAGGC[CG]GACTTGG[
CG]GGGTC[CG]GTGCAGGAGGG[CG][CG]CTGGG[CG]GG[CG
]G[CG]GG[CG]GGG[CG]GTCAGCACCC[CG]GACAGCTCC[CG
]C[CG]CTAGATCCTGGGGC[CG]CAGCTCCAGC[CG]C[CG]C[
CG][CG][CG]CTCTGCCTCCACAATG[CG]GCCACAG[CG]G[C
G]G[CG]GGAGGAGGAGGGTGAATCCC[CG]CTCAGTCCATCCCT
CATTCCTGTGCCAGCT[CG]G[CG]A[CG]TACACTGCTGCTTAG
GGAGCAAAGCACTTCCAC[CG]C
SEQ ID NO: 5335
GCT[CG]GAAGGGGTGTGGAGGAGCCAGATGGGAAGAGAAGCAG[
CG]GGA[CG]AGGG[CG]AGGAAGGGCTGGAGATTGTTAGAGGAC
AGATGGGG[CG]GGACTGGGGAGAGGGG[[CG]]AAGG[CG]A[C
G][CG]C[CG]AGGCACTCCTC[CG]CCCCATGAGCACAGACAGT
AACTC[CG]AAA[CG][CG]CAGATGGGC[CG]TAAGGTAAAGAG
GCCTTTTTTCCCTCTCCTCTC[CG]TCCTCTACCCTGCTCCCCTC
CTAGACACTTGGTGAAAAAGCAAGGTG[CG]GTGTACCTGGAG[C
G]AACACCATGATTTCTTCCAGC[[CG]]CTA[CG]CCCCCAGAT
TAAGAGAGAAAGACAGGCAGA[CG]GAGGATGGGAAGAAGGC[CG
]GACTTGG[CG]GGGTC[CG]GTGCAGGAGGG[CG][CG]CTGGG
[CG]GG[CG]G[CG]GG[CG]GGG[CG]GTCAGCACCC[CG]GAC
AGCTCC[CG]C[CG]CTAGATCCTGGGGC[CG]CAGCTCCAGC[C
G]C[CG]C[CG][CG][CG]CTCTGCCTCCACAATG[CG]GCCAC
AG[CG]G[CG]G[CG]GGAGGAGGAGGGTGAATCCC[CG]CTCAG
TCCATCCCTCATTCCTGTGCCAGCT[[CG]]G[CG]A[[CG]]TA
CACTGCTGCTTAGGGAGCAAAGCACTTCC
SEQ ID NO: 5336
CCTT[CG]AA[CG][CG]CTGGC[CG]GCCCCCTCCTAGCCTGGT
GCAGT[CG]GCTC[CG]CTTCTACTCAGTCT[CG]GGTCCTCCTG
GGCCAA[CG]CAGACCCTGGTGCCTCCTTCCTTAGA[CG]AGCTA
AGGTCAAGACTTCTGCTGCTG[CG]GAGGAGCC[CG][CG]CACC
AGGC[CG]GGGTGGACTG[CG]CCTG[CG]CAT[CG]GGCC[CG]
CCTGGTTCTTAGGAACTA[CG]ACTCCCAGGGGG[CG]CTG[CG]
[CG]CT[CG]C[CG]GCAC[CG][CG]ACTAAAGCTTGCAAAGCC
TGGGTCAT[CG]AAACTACAACTCCCAGAAGGCTAAG[[CG]]TC
TGCACA[CG]CTAGGTC[CG]CAGGG[CG]CTGACCCCTGGGGGC
C[CG]AGGAG[CG]C[CG]GGCTGCTGCCC[CG]AGCCC[[CG]]
CCCACTACAGCCTCAGTGCATGG[CG]GTGGG[CG]CTTCCAGTA
ACTCAGGGGGGGACTTTTTTCTTGCTCAGGGGATGAGGC[CG]AG
CCCACAGGCTTAGAAAGAAGGAACTTGAGTC[CG]GGCACCTGTC
ATCCCAG[CG]CTTAGGGAGGC[CG]AGG[CG]GGTGGATCACCT
GAGGTCAGGAGTT[CG]AGACCAGCCTGGCCAATATGG[CG]AAA
CCCC[CG]TCTCTACTAA
SEQ ID NO: 5337
GACAAGCCACCTTCTCCATGCTCCTCTCCCCAAAGGGTAAGATTT
ATTCTAAGGGTTCTGAATT[CG]TCACATTTATAAACCC[CG]TG
GGTC[[CG]]GCACAGCAATTAACATTGGTCCAAA[CG]GTGTCA
GTGAACTTTAGCTGCAAAGAAACTACCTCATTTAAAATTTAAGCA
GACCACAGGGAGTAGCATTGGAGGAAAGAGAGGAGATTTTCTCCT
TCAACATTTTGAGCATACTGGAATGCCAACCCCCTAGGTAGGTGC
CAGGGCCACCACAGGAACCTGACT[CG]CAGGAGT[CG]TCCTC[
CG]TCTCTA[CG][CG]AAG[CG]CCCCCT[CG]AGGTGGGCAGG
GGGTGG[CG]G[CG]G[CG]A[CG]GTGG[CG]GAGC[CG]CAGA
G[CG]AGCTAGAGAG[CG]AGAG[CG]GTGAGACTCTG[CG]GA[
[CG]]TCTTCC[CG]CC[CG]C[CG][CG]CTC[CG]CCCCACCC
AGCCTC[CG]CAGCCT[CG]GGC[CG]GAT[CG]CC[CG]G[CG]
GGGAAGATG[CG]CCTCAAGAACCAGGTAGAAG[CG]CCT[CG]G
[[CG]]CAGGCCC[CG]CACCCC[CG]ACTCTGCC[CG]CCCTCT
GTTA[CG]GACACC[CG]CTGGGCCA[[CG]]TGGT[CG][CG]A
CTGGCTTCTCCCAG[CG]GCCAGCC
SEQ ID NO: 5338
CAC[CG]TTGCTCT[CG]CCTCC[CG]GTATCACCTT[CG]AA[C
G][CG]CTGGC[CG]GCCCCCTCCTAGCCTGGTGCAGT[CG]GCT
C[CG]CTTCTACTCAGTCT[CG]GGTCCTCCTGGGCCAA[CG]CA
GACCCTGGTGCCTCCTTCCTTAGA[CG]AGCTAAGGTCAAGACTT
CTGCTGCTG[CG]GAGGAGCC[CG][CG]CACCAGGC[CG]GGGT
GGACTG[CG]CCTG[CG]CAT[CG]GGCC[CG]CCTGGTTCTTAG
GAACTA[CG]ACTCCCAGGGGG[CG]CTG[CG][CG]CT[CG]C[
[CG]]GCAC[CG][CG]ACTAAAGCTTGCAAAGCCTGGGTCAT[C
G]AAACTACAACTCCCAGAAGGCTAAG[[CG]]TCTGCACA[CG]
CTAGGTC[CG]CAGGG[CG]CTGACCCCTGGGGGCC[CG]AGGAG
[CG]C[CG]GGCTGCTGCCC[CG]AGCCC[CG]CCCACTACAGCC
TCAGTGCATGG[CG]GTGGG[CG]CTTCCAGTAACTCAGGGGGGG
ACTTTTTTCTTGCTCAGGGGATGAGGC[CG]AGCCCACAGGCTTA
GAAAGAAGGAACTTGAGTC[CG]GGCACCTGTCATCCCAG[CG]C
TTAGGGAGGC[CG]AGG[CG]GGTGGATCACCTGAGGTCAGGAGT
T[CG]AGACCAGCCTGGCCA
SEQ ID NO: 5339
TGCCAAAGACAAGCCACCTTCTCCATGCTCCTCTCCCCAAAGGGT
AAGATTTATTCTAAGGGTTCTGAATT[CG]TCACATTTATAAACC
C[[CG]]TGGGTC[[CG]]GCACAGCAATTAACATTGGTCCAAA[
[CG]]GTGTCAGTGAACTTTAGCTGCAAAGAAACTACCTCATTTA
AAATTTAAGCAGACCACAGGGAGTAGCATTGGAGGAAAGAGAGGA
GATTTTCTCCTTCAACATTTTGAGCATACTGGAATGCCAACCCCC
TAGGTAGGTGCCAGGGCCACCACAGGAACCTGACT[[CG]]CAGG
AGT[CG]TCCTC[CG]TCTCTA[CG][CG]AAG[CG]CCCCCT[C
G]AGGTGGGCAGGGGGTGG[CG]G[CG]G[CG]A[CG]GTGG[CG
]GAGC[CG]CAGAG[CG]AGCTAGAGAG[CG]AGAG[[CG]]GTG
AGACTCTG[CG]GA[[CG]]TCTTCC[CG]CC[CG]C[CG][CG]
CTC[CG]CCCCACCCAGCCTC[CG]CAGCCT[CG]GGC[CG]GAT
[CG]CC[CG]G[CG]GGGAAGATG[CG]CCTCAAGAACCAGGTAG
AAG[CG]CCT[CG]G[[CG]]CAGGCCC[CG]CACCCC[CG]ACT
CTGCC[CG]CCCTCTGTTA[CG]GACACC[CG]CTGGGCCA[CG]
TGGT[CG][CG]ACTGGCTTCTCCCAG
SEQ ID NO: 5340
TACATTCCCTGCCAAAGACAAGCCACCTTCTCCATGCTCCTCTCC
CCAAAGGGTAAGATTTATTCTAAGGGTTCTGAATT[CG]TCACAT
TTATAAACCC[[CG]]TGGGTC[CG]GCACAGCAATTAACATTGG
TCCAAA[CG]GTGTCAGTGAACTTTAGCTGCAAAGAAACTACCTC
ATTTAAAATTTAAGCAGACCACAGGGAGTAGCATTGGAGGAAAGA
GAGGAGATTTTCTCCTTCAACATTTTGAGCATACTGGAATGCCAA
CCCCCTAGGTAGGTGCCAGGGCCACCACAGGAACCTGACT[CG]C
AGGAGT[CG]TCCTC[[CG]]TCTCTA[CG][CG]AAG[CG]CCC
CCT[CG]AGGTGGGCAGGGGGTGG[CG]G[CG]G[CG]A[CG]GT
GG[CG]GAGC[CG]CAGAG[CG]AGCTAGAGAG[CG]AGAG[[CG
]]GTGAGACTCTG[CG]GA[[CG]]TCTTCC[CG]CC[CG]C[CG
][CG]CTC[CG]CCCCACCCAGCCTC[CG]CAGCCT[CG]GGC[C
G]GAT[CG]CC[CG]G[CG]GGGAAGATG[CG]CCTCAAGAACCA
GGTAGAAG[CG]CCT[CG]G[CG]CAGGCCC[CG]CACCCC[CG]
ACTCTGCC[CG]CCCTCTGTTA[CG]GACACC[CG]CTGGGCCA[
[CG]]TGGT[CG][CG]ACTGGCTT
SEQ ID NO: 5341
CA[CG][CG]GTCACACACCTGCAGGAACA[CG][CG]CACACTA
CACAC[CG]TTGCTCT[CG]CCTCC[CG]GTATCACCTT[CG]AA
[CG][CG]CTGGC[CG]GCCCCCTCCTAGCCTGGTGCAGT[CG]G
CTC[CG]CTTCTACTCAGTCT[CG]GGTCCTCCTGGGCCAA[CG]
CAGACCCTGGTGCCTCCTTCCTTAGA[CG]AGCTAAGGTCAAGAC
TTCTGCTGCTG[CG]GAGGAGCC[CG][[CG]]CACCAGGC[CG]
GGGTGGACTG[CG]CCTG[CG]CAT[CG]GGCC[CG]CCTGGTTC
TTAGGAACTA[CG]ACTCCCAGGGGG[CG]CTG[CG][CG]CT[[
CG]]C[CG]GCAC[CG][[CG]]ACTAAAGCTTGCAAAGCCTGGG
TCAT[[CG]]AAACTACAACTCCCAGAAGGCTAAG[CG]TCTGCA
CA[CG]CTAGGTC[CG]CAGGG[CG]CTGACCCCTGGGGGCC[CG
]AGGAG[CG]C[CG]GGCTGCTGCCC[CG]AGCCC[CG]CCCACT
ACAGCCTCAGTGCATGG[CG]GTGGG[CG]CTTCCAGTAACTCAG
GGGTGGGACTTTTTTCTTGCTCAGGGGATGAGGC[CG]AGCCCAC
AGGCTTAGAAAGAAGGAACTTGAGTC[CG]GGCACCTGTCATCCC
AG[CG]CTTAGGGAGGC[CG]AGG[CG]GGT
SEQ ID NO: 5342
GTTCCTTCT[CG]CCCAGCCTTGCAATCCATGC[CG]AGAGGAAG
GCAGTG[CG]AGCC[CG][CG]CCAG[CG]CCCAGCTCC[[CG]]
GGACAGGGT[CG]GCAATGCTGCTGAGCAGAACTTGAT[CG][CG
]CTCCTTCCT[CG]CTGCTAGTGGAAG[CG]ATGCTGCA[CG]GC
ACAGCTAG[[CG]]CTTCCC[CG]GCTCTCCTTCAAGCTGAAGGT
TAC[CG]ACC[CG][CG]CAGCCAGCCCCAGCACTGTGAGCTG[C
G][CG]CCTCAGGTC[CG]GGCTC[CG]GCTGCTTGG[CG]G[CG
]G[CG]CCCAGGGCAACAAC[CG]GGC[CG]CC[CG][CG]C[CG
]GGG[CG]CACTGCACCAG[CG]GCTT[CG]GCTTGGTGGATGTG
TATGCATGAGTTCTGCAC[CG]AATGGG[CG]CAAAAAG[CG]CC
CCAGC[[CG]]GTCCACC[CG]CTCCT[CG]ATCTTCCAGATCAG
CAAGCCCC[CG]CTGCAGAG[CG]GAGATTGGGAG[CG]CAGGGG
CAG[CG]GCTC[CG]AGAG[CG]CCCACAAAACCCAA[[CG]]AG
CCCTGGA[CG]ACTGCAAGATGGTGGGTGAAAACTG[CG]CCTCT
TTTTTTTTTTTTTTAATTGAGAGGGGGTGGGGGGAGTCATGTATG
TTAATCATTTGCCTGAGTGCCAGCCACTC
SEQ ID NO: 5343
GGG[CG]GAGGCAAGGACTCTAGCTTGAGGTTCTTTGAGGCAGAG
CAGAAATTAGCCCCTAGGTGTGC[[CG]]TC[CG]TGG[CG][CG
]AGTCA[CG]GAACTCCAGGTACCC[CG]GGGT[CG]TGTC[CG]
CACCTTTGTCCTCAGTCCCCAGAAG[CG]T[CG]AAATTTCTTAG
CA[CG]ACACCCCTGCCT[CG][CG]CTACATCTCTTCCCCCTAG
GGGGTTGGTGGCCTC[CG]TGCTCAAAGGAGGCAG[CG]GGAA[C
G]CCTAACTTCTAAGATGCCCTTAATTGATCTCCTCCTTCTTAAC
TACAG[CG]AGGGAATAACAACT[[CG]]GGGCTGGGGACTGGGT
ATCTAAGACT[CG]CTCTC[CG]CAGGGTC[CG]C[CG]GCAGGG
[CG]GCCACAGGACC[CG]GGACTGGAACTGGCC[CG]GGAGGAC
AC[CG]G[CG][CG]TGTCAGG[CG]CAGAG[CG]TGAAACAGGC
AAGCTG[CG][CG]CAGAGCAGGGCTTGGATGG[CG]GATCTTGG
GCACAATGAGCCC[CG]GATCCTGAAGGAAGATAACCCCTGCTGA
GACCCTGTC[CG]GAGCCTTGGAGCTTTTCAGCAGTTTAGGCT[C
G]GATCTC[CG]GCCTGGGTTTT[CG]GTGCAGAGCTGCTTGAAG
AGTTG
SEQ ID NO: 5344
GCAGC[CG]G[CG]GTTTGTGCCCATCTGTGGGGGCAAGTCCTAC
CTTCTGCCAAAAGG[CG][CG]A[CG]CATGCACAAAAGATGGAT
CCAGGCTATCTTTCTCTGCCATCAGCTCAGGCAAATATTTCTCCT
CTTCCATAG[CG][CG]GACTT[CG]GATTGTCCC[[CG]]GG[C
G]AAG[CG][CG]AGGTTC[CG]CT[CG]CT[CG]GA[CG]CAGG
CAGGGTCTTGGGGCAG[CG]CCTGGCTCC[CG][CG]CTGCTCCT
CCTC[CG][CG][CG]G[[CG]]AGGGATCTCTGTG[CG]TCCTC
ACTGGCCCATGCACCCAGCACCTG[CG]ACTCC[CG]C[CG]T[C
G]GGCTG[CG]TGGCCC[CG][CG]CCCACACCTGCC[CG]TCCC
TTC[CG]T[CG]TCCCT[CG]CT[CG][CG]CAGAGCCC[CG]GC
TCACACCAG[CG]GCCTTAACTGGAGAGG[[CG]]GGAACAGGA[
[CG]][CG]GCCCACCTC[CG]CCAACCACTCATTGGTGGTGGTG
CCAGGAGAGG[CG]GGG[[CG]]CTGGCAGAAGGC[CG][CG]GG
CTCTCATTGGG[[CG]]GTAG[CG]CAAGT[CG]GGTGGCCTGAC
TGGCAGGAGGCAGCTGCAGAGGGGAAGGGAGCT[CG]GAAGATGC
AAA[CG]CTTTCTTCTTG[CG]CCCAAGCCTTCCCTGGCTATT
SEQ ID NO: 5345
AGAGGGCCCAC[CG]AGCACTA[CG]G[CG]GGTG[CG]CA[CG]
CCC[CG]GGG[CG]CT[CG]GCAGGA[CG]ACAGTCTGCACAGCC
[CG]AAGG[[CG]]GAAA[CG]AGCATCAACTGCACAAAGTCCTG
GGGTCCTGGAGCATCCCCTC[CG][CG]TCCTTCCTCCCTCTGGG
GCTGGGGACAGC[CG]GGATGTCCCAGGCTGAGGTGGCCACCAGC
[CG]AG[CG][CG]GCTGCTAGGA[CG]CTGG[CG]TGGGGAG[C
G][CG]G[CG][CG]GAACTA[CG]GACAGTGAGCCCTGG[CG]C
T[CG]CTGCCCTG[CG]CCTTAATTTGCTGG[CG]G[CG]G[CG]
ATCC[[CG]]GAGGCC[CG]CAGCCAGTCAG[CG]C[CG]TCTCA
[CG]TCAC[CG]CTTCCTGATTC[CG]C[CG]C[CG]GGGG[CG]
GGGC[CG][CG]GGC[CG]GG[CG][CG]GAGGG[CG][CG]CCC
AGGGTG[CG]G[CG]CC[CG][[CG]]TGGCCTGT[CG]CCC[CG
]GCTGTT[[CG]]GTACCCCAGCACAGGTTCAGGGAAAAGGGTGC
CACCACTAGGCTGA[CG]CAGCAGCCATGGACATCCCCACCTGGT
CTCACAGCCC[CG]GG[CG]GGAGGG[CG]GTG[CG][CG]CTGT
[CG]GGAGAGGACACATCAC[CG][CG]GCCTAA[CG]CC[CG]A
GATC[CG]GGCATGGCCCAGTT
SEQ ID NO: 5346
AG[CG]GC[CG][CG]GGCAGCCC[CG]GG[CG]G[CG]G[CG]G
GGG[CG]G[CG]GCAGGGGGGG[CG]G[CG]G[CG]G[CG]GCTG
TAG[CG]GACACTGGGGCTGGGGCTGGGG[CG]AGGGTGG[CG]G
[CG]G[CG]GGGGCAGGTGGTGATGGGGATGCAGGAGG[CG]GAA
CTGGGGCTGC[CG]GAG[CG]GGTACTGGTGGTGCTGCT[CG]TG
CCTCCAGAGATGCTTGGGGGCTTTGAG[[CG]]TGGCCC[CG]C[
CG]G[CG]CTGT[CG]CTGCCCTCTC[CG]CTGCC[CG]CC[CG]
GGC[CG]G[CG][CG]CTGCTGCCCTCTGCCTCCATCCTGGCT[C
G][CG]GCTC[CG][[CG]]ACCTGCTGCCCAGCC[CG]GGTTCA
C[CG][CG]CTGGCC[CG]AG[CG]CCTTCCTGATGCTGCTGCTG
CTGCTGC[CG]C[CG]C[CG]C[CG]CTTCTGCAGCCCAGCAGAG
GCTGGTGCTTAGCTTCTCACTTGAAGG[CG]CCAGAGCCTCAGGG
CTAC[CG]AGAGGGGGCCCTGCCAG[CG]GGAGGGGTCACAGAA[
CG][CG]GCAGGGCTCCTTCCAC[CG]AGGCTATGGCAGAGACA[
CG]CTCC[CG]GGCTCCCCAAGTCACCAAGACTAGGGTG[[CG]]
[CG]GTGCC[CG]GTTT[CG]CCAGAGGTTGGTCCTTCTTCCTCC
CT
SEQ ID NO: 5347
GC[CG][CG]A[CG]GGACCACAGAAAT[CG]ACCAG[CG]GCCT
GTTTAAGGAG[CG]ACAAGGCCCAGCCCTCTCCTGCATTGTGG[C
G]A[CG]CCATTTCCCTG[CG]CCCCCAG[CG][CG]GC[CG]CT
TGGCTTTTGTTTGAGGTGA[CG]CTGGG[CG]GCAGCATCCTTCC
CTCAGCCCTGGGGACCAG[CG]GGGACTACAGAACCCAGAAGGTT
TTGTCTCCAGC[[CG]]CAGGGATGCTGAGCCAATC[[CG]][CG
]CTGAGAAAAGGGT[CG]TTTC[[CG]]CTTTGGGACCAATGGGT
[CG]GGGAGGGACTTC[CG]GTATCACTTCAGTGG[CG]GTCATT
TTTGCAG[CG]CTTGGGTGCATCCAGAC[CG]TCAGAGCTTTGGG
AG[CG]CTTTGTTTGG[[CG]]ACAGT[[CG]]GAAGG[[CG]][
CG]AGGGGAGGGGTCCTCC[CG]CTGAACAGTGGGGGTTCTAAGG
GT[CG]G[CG]G[CG]G[CG]GGGTTGA[CG]GCTTTGCCTAGGT
CCCTC[CG]CC[CG]TAGCTGT[CG]GGTCC[CG]GCCC[CG]CT
CTGCCCACAGACTC[CG]ATGGCTG[CG]GC[CG][CG]CTGAGG
GCCC[CG]ACTCAGGTGAG[CG]CTGCCTCTACTGGGCCTCACCC
TCCATCCCCAAATTAGTGCCTTCTTGGGTCA
SEQ ID NO: 5348
GGGACCAATCAC[[CG]]GCTCTGAGAAAGTT[CG]GCAGTGGCC
ACCACATCTGGTTCT[CG]TTAACTTTTCTAAGGCAG[CG]GC[[
CG]]CTGGAGCAG[[CG]]GGGCTGG[CG]GGGTAAAAGCTCCTG
GCCAGGGCTGCCTGGAGCTGCCCCTTCCACTC[CG]CCCCCAGGG
AGCTCC[CG]GGTCATCCTCTCATC[CG]GGCTGCCC[[CG]][C
G]GCCCCCAAGGAGCCCCACCCC[CG]GGACCAAATGGCC[CG]C
AAGGTTTGGGGCAG[CG]G[CG]TTGCAGGAGATGAGCTCAG[[C
G]]CAAAGGGAACCC[CG]CAG[CG]G[CG]AGTG[[CG]]GCTG
CTGGCCTG[CG][CG]CTGTGGCCCCAACAGGCTGGCAGGG[CG]
[CG]GG[CG]GGTGG[CG]GGGTTG[CG]GTATGAGCTTTGCTCC
CTGCCCTGGGGTCC[CG]GG[CG]CTCCTGGCTCTGGAGGCCTGG
CCAT[CG]GTC[CG]AAAAGCAAAGGGACATTGT[CG]TGGTCCC
CT[CG]GC[CG]CTT[CG]CTCCACCCAGAGA[CG]CCCTGAGGA
GAAG[CG]AGCCTTTGTA[CG]AAGGCAGAGGGCTGACTCCTAAG
TTCTGTCCCCCTCC[CG]AAGGC[CG]GC[CG]CTAGGGAAGACT
TGGCCACCCTCTGGAAGTACC
SEQ ID NO: 5349
CAAGCTAATTGGCTGAGGCCCT[CG]GCTGGGGACCAATCAC[CG
]GCTCTGAGAAAGTT[CG]GCAGTGGCCACCACATCTGGTTCT[C
G]TTAACTTTTCTAAGGCAG[CG]GC[[CG]]CTGGAGCAG[[CG
]]GGGCTGG[CG]GGGTAAAAGCTCCTGGCCAGGGCTGCCTGGAG
CTGCCCCTTCCACTC[[CG]]CCCCCAGGGAGCTCC[CG]GGTCA
TCCTCTCATC[CG]GGCTGCCC[[CG]][CG]GCCCCCAAGGAGC
CCCACCCC[CG]GGACCAAATGGCC[CG]CAAGGTTTGGGGCAG[
CG]G[CG]TTGCAGGAGATGAGCTCAG[[CG]]CAAAGGGAACCC
[CG]CAG[CG]G[CG]AGTG[[CG]]GCTGCTGGCCTG[CG][CG
]CTGTGGCCCCAACAGGCTGGCAGGG[CG][CG]GG[CG]GGTGG
[CG]GGGTTG[CG]GTATGAGCTTTGCTCCCTGCCCTGGGGTCC[
CG]GG[CG]CTCCTGGCTCTGGAGGCCTGGCCAT[CG]GTC[CG]
AAAAGCAAAGGGACATTGT[CG]TGGTCCCCT[CG]GC[CG]CTT
[CG]CTCCACCCAGAGA[CG]CCCTGAGGAGAAG[CG]AGCCTTT
GTA[CG]AAGGCAGAGGGCTGACTCCTAAGTTCTGTCCCCCTCC[
CG]AAGGC[CG]GC[CG]CTAGG
SEQ ID NO: 5350
TGGGCCAA[CG]CAGACCCTGGTGCCTCCTTCCTTAGA[CG]AGC
TAAGGTCAAGACTTCTGCTGCTG[CG]GAGGAGCC[CG][[CG]]
CACCAGGC[CG]GGGTGGACTG[CG]CCTG[CG]CAT[CG]GGCC
[CG]CCTGGTTCTTAGGAACTA[CG]ACTCCCAGGGGG[CG]CTG
[CG][CG]CT[[CG]]C[[CG]]GCAC[CG][CG]ACTAAAGCTT
GCAAAGCCTGGGTCAT[[CG]]AAACTACAACTCCCAGAAGGCTA
AG[[CG]]TCTGCACA[CG]CTAGGTC[CG]CAGGG[CG]CTGAC
CCCTGGGGGCC[CG]AGGAG[CG]C[CG]GGCTGCTGCCC[CG]A
GCCC[CG]CCCACTACAGCCTCAGTGCATGG[CG]GTGGG[CG]C
TTCCAGTAACTCAGGGGGGGACTTTTTTCTTGCTCAGGGGATGAG
GC[CG]AGCCCACAGGCTTAGAAAGAAGGAACTTGAGTC[CG]GG
CACCTGTCATCCCAG[CG]CTTAGGGAGGC[CG]AGG[CG]GGTG
GATCACCTGAGGTCAGGAGTT[CG]AGACCAGCCTGGCCAATATG
G[CG]AAACCCC[CG]TCTCTACTAAAAATACAAAAATTAGC[CG
]AGCATGGTGGCATGCACTTCCAGCTACTTGGAAGGCTGAGG[CG
]GGAGAATGGCTTG
SEQ ID NO: 5351
TGGTTCCCTTCCA[CG]GGGGTCC[CG]AGGTGCTTTGAGGAGGG
AGAAAGAGGG[CG]TCCCCTCTGGGGAGCCCACTCTC[CG]GGCT
TCTACTGACCTGGTCTC[CG]CCTCAC[CG]GCCTCTTG[CG]GC
[CG]CTGCAGAAG[CG]CACTTTGCTGAACACCC[CG]AGGA[CG
]TGCCTCT[CG]CACAGGGAG[CG]CC[CG]TCTTTGCTGGGGCT
GGAG[CG]G[CG]CTTGGAGGC[CG]ACACT[CG]GT[CG]CTGT
TGGACTCCCT[CG]CCTGC[CG]CTTCTGC[CG]GATCAAGGAGC
TGGCTAT[CG]C[CG]CAGCCATAGCTGCTCAG[CG]AGGGCCTC
AGGCCCCAGCCTCTACTG[CG]CCCTC[CG]GCTTG[CG]CTC[C
G]C[CG]GGG[CG]AGGGCAGGACCTGGG[CG]GCCAGGGAAAGG
GCAGT[CG][CG]GGGAGGCAGTGCTAAAATTTGAGGAGGCTGCA
GTAT[CG]AAAACC[CG]G[[CG]]CTCACAAGGTTAGTCAAAGT
CTGGGCAGTGG[CG]ACAAAATGTGTGAAAATCCAGATGTAAACT
TCCCCAACCTCTGG[CG]GC[CG]GGGGG[CG]GGG[CG]GGG[C
G]GTCCCAGGCCCTCTTG[CG]AAGTAGA[CG]TTTGCACCCCAA
ACTTGCACCCCAAGG
SEQ ID NO: 5352
TAAGCAGGTGCAGATGCAGTGACAGGCTCACAGGCAGTCACACAC
CTGCACCTGCTGGTAC[CG]T[CG]AGTGACCAGGTGCAGA[CG]
CTGTGTTACTCAGGGA[CG]GGCTCACAGGCAGTCACACACCTAT
A[[CG]]GGCTGACAC[CG]CTAAGTGAACAGGTGCAGACACAAT
GGCACT[CG]GGGA[CG]GGCTCACA[CG][CG]GTCACACACCT
GCAGGAACA[CG][CG]CACACTACACAC[CG]TTGCTCT[CG]C
CTCC[CG]GTATCACCTT[CG]AA[CG][CG]CTGGC[CG]GCCC
CCTCCTAGCCTGGTGCAGT[CG]GCTC[[CG]]CTTCTACTCAGT
CT[CG]GGTCCTCCTGGGCCAA[CG]CAGACCCTGGTGCCTCCTT
CCTTAGA[CG]AGCTAAGGTCAAGACTTCTGCTGCTG[CG]GAGG
AGCC[CG][[CG]]CACCAGGC[CG]GGGTGGACTG[CG]CCTG[
CG]CAT[CG]GGCC[CG]CCTGGTTCTTAGGAACTA[CG]ACTCC
CAGGGGG[CG]CTG[CG][CG]CT[CG]C[CG]GCAC[CG][[CG
]]ACTAAAGCTTGCAAAGCCTGGGTCAT[CG]AAACTACAACTCC
CAGAAGGCTAAG[CG]TCTGCACA[CG]CTAGGTC[CG]CAGGG[
CG]CTGACCCCTGGGGGCC[CG]AG
SEQ ID NO: 5353
GAGAGGAGAGGGCCCAC[CG]AGCACTA[CG]G[CG]GGTG[CG]
CA[CG]CCC[CG]GGG[CG]CT[CG]GCAGGA[CG]ACAGTCTGC
ACAGCC[CG]AAGG[[CG]]GAAA[CG]AGCATCAACTGCACAAA
GTCCTGGGGTCCTGGAGCATCCCCTC[CG][CG]TCCTTCCTCCC
TCTGGGGCTGGGGACAGC[CG]GGATGTCCCAGGCTGAGGTGGCC
ACCAGC[CG]AG[CG][CG]GCTGCTAGGA[CG]CTGG[CG]TGG
GGAG[CG][CG]G[CG][CG]GAACTA[CG]GACAGTGAGCCCTG
G[CG]CT[CG]CTGCCCTG[CG]CCTTAATTTGCTGG[CG]G[CG
]G[CG]ATCC[CG]GAGGCC[CG]CAGCCAGTCAG[CG]C[CG]T
CTCA[CG]TCAC[CG]CTTCCTGATTC[CG]C[CG]C[CG]GGGG
[CG]GGGC[CG][CG]GGC[CG]GG[CG][CG]GAGGG[CG][CG
]CCCAGGGTG[CG]G[CG]CC[CG][[CG]]TGGCCTGT[CG]CC
C[CG]GCTGTT[CG]GTACCCCAGCACAGGTTCAGGGAAAAGGGT
GCCACCACTAGGCTGA[CG]CAGCAGCCATGGACATCCCCACCTG
GTCTCACAGCCC[CG]GG[CG]GGAGGG[CG]GTG[CG][CG]CT
GT[CG]GGAGAGGACACATCAC[CG][CG]GCCTAA[CG]CC[CG
]AGATC[CG]GGCATGGC
SEQ ID NO: 5354
GCAGCAGCAGTAGCACTGGTAA[CG]A[CG]ACAGCAC[CG]GC[
CG]CC[CG]GCCACC[CG]GTCCCCCTCCATGCT[CG]CT[CG]G
C[CG]TG[CG]CTTACC[CG]CTGCACAA[CG][CG]TCC[CG]C
CC[CG]GCCTCCAGCCCACTCTC[CG][CG]C[CG][CG]CCAGC
CT[CG]AACCTGGATCTC[CG][CG]GG[CG]CCTGGG[CG]GGG
[CG]GGACTCCAGGCCCACCCAGCAAGCTAATTGGCTGAGGCCCT
[CG]GCTGGGGACCAATCAC[[CG]]GCTCTGAGAAAGTT[CG]G
CAGTGGCCACCACATCTGGTTCT[CG]TTAACTTTTCTAAGGCAG
[CG]GC[[CG]]CTGGAGCAG[CG]GGGCTGG[CG]GGGTAAAAG
CTCCTGGCCAGGGCTGCCTGGAGCTGCCCCTTCCACTC[[CG]]C
CCCCAGGGAGCTCC[CG]GGTCATCCTCTCATC[CG]GGCTGCCC
[[CG]][CG]GCCCCCAAGGAGCCCCACCCC[CG]GGACCAAATG
GCC[CG]CAAGGTTTGGGGCAG[CG]G[CG]TTGCAGGAGATGAG
CTCAG[CG]CAAAGGGAACCC[CG]CAG[CG]G[CG]AGTG[CG]
GCTGCTGGCCTG[CG][CG]CTGTGGCCCCAACAGGCTGGCAGGG
[CG][CG]GG[CG]GGTGG[CG]GGGTTG[CG]GTATGAGC
SEQ ID NO: 5355
AAGTC[CG]CCCCCCTCAC[CG]GGGCATGGT[CG]GAGGGTGGC
TGCTG[CG]CTC[CG]GGGCAGTTCTTCTCCTGCTTC[CG]GGGG
G[CG]GGGAAGGAGCAGACACAGCAGACACACAGAGAAAGAGAGG
CAGGGATTATTGCC[CG]AAAC[CG]CCAGC[CG]C[CG]GCAGC
CTC[CG]C[CG]ACCCTCCCTGCTCCCCAGGTC[CG][CG][CG]
CAGCCTGCAGCCTCTCAGC[CG]GGTTC[CG]GCAGTG[CG]TCC
AGGG[CG]C[CG]AGGGGAAGGGCTGGGCCC[CG]GGGACTGGGG
[CG][CG]GTGGGGGCACACAGACTCTCCAGGT[[CG]][CG][C
G][CG]CCCTTCCTGCTCCTCTGCTATTTTCCTGAACTCCCCAGA
ACCCCCAGTTGCCTGGCTTCCAT[CG]CC[CG]CAACTAG[CG]C
[CG]CTGT[CG]AGATTTTC[CG]CAATACAACTGCAGGGGT[[C
G]]TTATTTCCT[[CG]]CCTA[CG]GATCCCTA[CG]CTTCCCA
ACTCAGAGAGGAGGAGGACAGGTGGGGG[CG]GGAGGGGGAGGAG
GAGAAGGAGGCTTGGCCAGGTGAG[CG]TCCT[CG]C[CG]C[CG
]C[CG]GG[CG]TCCCAG[CG]TCAGCTC[CG]CAGCC[CG]GCA
CC[CG]GGGG[CG]GAGGCAGGAGGCC[CG]GG
SEQ ID NO: 5356
AGGCAAATATTTCTCCTCTTCCATAG[CG][CG]GACTT[CG]GA
TTGTCCC[[CG]]GG[CG]AAG[CG][CG]AGGTTC[CG]CT[CG
]CT[CG]GA[CG]CAGGCAGGGTCTTGGGGCAG[CG]CCTGGCTC
C[CG][CG]CTGCTCCTCCTC[CG][CG][CG]G[CG]AGGGATC
TCTGTG[CG]TCCTCACTGGCCCATGCACCCAGCACCTG[CG]AC
TCC[CG]C[[CG]][[CG]]GGCTG[CG]TGGCCC[CG][CG]CC
CACACCTGCC[CG]TCCCTTC[CG]T[CG]TCCCT[CG]CT[CG]
[CG]CAGAGCCC[CG]GCTCACACCAG[CG]GCCTTAACTGGAGA
GG[CG]GGAACAGGA[CG][CG]GCCCACCTC[CG]CCAACCACT
CATTGGTGGTGGTGCCAGGAGAGG[CG]GGG[CG]CTGGCAGAAG
GC[CG][CG]GGCTCTCATTGGG[[CG]]GTAG[CG]CAAGT[CG
]GGTGGCCTGACTGGCAGGAGGCAGCTGCAGAGGGGAAGGGAGCT
[CG]GAAGATGCAAA[CG]CTTTCTTCTTG[[CG]]CCCAAGCCT
TCCCTGGCTATTAGGCATGCCCAGTTTTGTGGAGTTCTCTGTGTC
TTCAGCTAAGG[CG]CAGAGGAGAGAGAG[CG][CG]GGAAAAG[
CG]CAGGTTAAAGAGAGAGGTCTGAGTACAAGTGGACA
SEQ ID NO: 5357
AGCATCCTTCCCTCAGCCCTGGGGACCAG[CG]GGGACTACAGAA
CCCAGAAGGTTTTGTCTCCAGC[CG]CAGGGATGCTGAGCCAATC
[[CG]][CG]CTGAGAAAAGGGT[CG]TTTC[CG]CTTTGGGACC
AATGGGT[CG]GGGAGGGACTTC[CG]GTATCACTTCAGTGG[CG
]GTCATTTTTGCAG[CG]CTTGGGTGCATCCAGAC[CG]TCAGAG
CTTTGGGAG[CG]CTTTGTTTGG[[CG]]ACAGT[CG]GAAGG[C
G][CG]AGGGGAGGGGTCCTCC[CG]CTGAACAGTGGGGGTTCTA
AGGGT[CG]G[CG]G[CG]G[CG]GGGTTGA[[CG]]GCTTTGCC
TAGGTCCCTC[CG]CC[CG]TAGCTGT[CG]GGTCC[CG]GCCC[
CG]CTCTGCCCACAGACTC[CG]ATGGCTG[CG]GC[CG][CG]C
TGAGGGCCC[CG]ACTCAGGTGAG[CG]CTGCCTCTACTGGGCCT
CACCCTCCATCCCCAAATTAGTGCCTTCTTGGGTCACTA[CG]GT
[CG]AGATCCTCATGTCCAGTACAGTGGGGGCT[CG]TGGGTGGG
GTCCCTATTTCCAGAACTTGGGTGATGGGGCA[CG]GAAGAGGGT
TACAGGCAAAGGGACCAG[CG]TTTCTAAACTCTTGGAGACACAG
TGAAGAA
SEQ ID NO: 5358
CCAGCA[CG][[CG]]GTCCTGGCCAGGGA[CG]GGGT[CG]TC[
CG]AACTGC[CG]TCCAGATTCCCCAAGGGAGACAAAGACC[CG]
AAACACAGCTCAAAGTTTC[CG]AGAGCAGTCACAG[CG]GGGCC
AGGGACTCCAGAAGTGTCAGCTCCAA[CG]ACTCCAGAGCTGCAC
ACTGGCCTCTATTCCCCAC[CG]CAAAGCCCCAGAGC[CG]CAGA
GACTT[CG]AAGGCAGC[CG]GAGAGGAGAGGGCCCAC[CG]AGC
ACTA[CG]G[CG]GGTG[CG]CA[CG]CCC[CG]GGG[CG]CT[C
G]GCAGGA[CG]ACAGTCTGCACAGCC[CG]AAGG[[CG]]GAAA
[CG]AGCATCAACTGCACAAAGTCCTGGGGTCCTGGAGCATCCCC
TC[CG][CG]TCCTTCCTCCCTCTGGGGCTGGGGACAGC[CG]GG
ATGTCCCAGGCTGAGGTGGCCACCAGC[CG]AG[CG][CG]GCTG
CTAGGA[CG]CTGG[CG]TGGGGAG[CG][CG]G[CG][CG]GAA
CTA[CG]GACAGTGAGCCCTGG[CG]CT[CG]CTGCCCTG[CG]C
CTTAATTTGCTGG[CG]G[CG]G[CG]ATCC[CG]GAGGCC[CG]
CAGCCAGTCAG[CG]C[CG]TCTCA[CG]TCAC[CG]CTTCCTGA
TTC[CG]C[CG]C[CG]GGGG[CG]GGGC[CG][CG]GGC[CG]G
SEQ ID NO: 5359
TCCTGCATTGTGG[CG]A[CG]CCATTTCCCTG[CG]CCCCCAG[
CG][CG]GC[CG]CTTGGCTTTTGTTTGAGGTGA[CG]CTGGG[C
G]GCAGCATCCTTCCCTCAGCCCTGGGGACCAG[CG]GGGACTAC
AGAACCCAGAAGGTTTTGTCTCCAGC[CG]CAGGGATGCTGAGCC
AATC[[CG]][CG]CTGAGAAAAGGGT[CG]TTTC[[CG]]CTTT
GGGACCAATGGGT[CG]GGGAGGGACTTC[CG]GTATCACTTCAG
TGG[[CG]]GTCATTTTTGCAG[CG]CTTGGGTGCATCCAGAC[C
G]TCAGAGCTTTGGGAG[CG]CTTTGTTTGG[[CG]]ACAGT[[C
G]]GAAGG[[CG]][CG]AGGGGAGGGGTCCTCC[CG]CTGAACA
GTGGGGGTTCTAAGGGT[CG]G[CG]G[CG]G[CG]GGGTTGA[[
CG]]GCTTTGCCTAGGTCCCTC[CG]CC[CG]TAGCTGT[CG]GG
TCC[CG]GCCC[CG]CTCTGCCCACAGACTC[CG]ATGGCTG[CG
]GC[CG][CG]CTGAGGGCCC[CG]ACTCAGGTGAG[CG]CTGCC
TCTACTGGGCCTCACCCTCCATCCCCAAATTAGTGCCTTCTTGGG
TCACTA[CG]GT[CG]AGATCCTCATGTCCAGTACAGTGGGGGCT
[CG]TGGGTGGGGTCCCTATTTCCAGA
SEQ ID NO: 5360
GCCATCAGCTCAGGCAAATATTTCTCCTCTTCCATAG[CG][CG]
GACTT[CG]GATTGTCCC[CG]GG[CG]AAG[CG][CG]AGGTTC
[CG]CT[CG]CT[CG]GA[CG]CAGGCAGGGTCTTGGGGCAG[CG
]CCTGGCTCC[CG][CG]CTGCTCCTCCTC[CG][CG][CG]G[C
G]AGGGATCTCTGTG[CG]TCCTCACTGGCCCATGCACCCAGCAC
CTG[CG]ACTCC[CG]C[CG]T[CG]GGCTG[CG]TGGCCC[CG]
[CG]CCCACACCTGCC[CG]TCCCTTC[CG]T[CG]TCCCT[CG]
CT[CG][CG]CAGAGCCC[CG]GCTCACACCAG[CG]GCCTTAAC
TGGAGAGG[[CG]]GGAACAGGA[CG][CG]GCCCACCTC[CG]C
CAACCACTCATTGGTGGTGGTGCCAGGAGAGG[CG]GGG[[CG]]
CTGGCAGAAGGC[CG][CG]GGCTCTCATTGGG[CG]GTAG[CG]
CAAGT[CG]GGTGGCCTGACTGGCAGGAGGCAGCTGCAGAGGGGA
AGGGAGCT[CG]GAAGATGCAAA[CG]CTTTCTTCTTG[[CG]]C
CCAAGCCTTCCCTGGCTATTAGGCATGCCCAGTTTTGTGGAGTTC
TCTGTGTCTTCAGCTAAGG[CG]CAGAGGAGAGAGAG[CG][CG]
GGAAAAG[CG]CAGGTTAAAGAGAGAGGTCTGAGT
SEQ ID NO: 5361
CAGCAGTAGCACTGGTAA[CG]A[CG]ACAGCAC[CG]GC[CG]C
C[CG]GCCACC[CG]GTCCCCCTCCATGCT[CG]CT[CG]GC[CG
]TG[CG]CTTACC[CG]CTGCACAA[CG][CG]TCC[CG]CCC[C
G]GCCTCCAGCCCACTCTC[CG][CG]C[CG][CG]CCAGCCT[C
G]AACCTGGATCTC[CG][CG]GG[CG]CCTGGG[CG]GGG[CG]
GGACTCCAGGCCCACCCAGCAAGCTAATTGGCTGAGGCCCT[CG]
GCTGGGGACCAATCAC[CG]GCTCTGAGAAAGTT[CG]GCAGTGG
CCACCACATCTGGTTCT[CG]TTAACTTTTCTAAGGCAG[[CG]]
GC[CG]CTGGAGCAG[[CG]]GGGCTGG[CG]GGGTAAAAGCTCC
TGGCCAGGGCTGCCTGGAGCTGCCCCTTCCACTC[CG]CCCCCAG
GGAGCTCC[CG]GGTCATCCTCTCATC[CG]GGCTGCCC[[CG]]
[CG]GCCCCCAAGGAGCCCCACCCC[CG]GGACCAAATGGCC[CG
]CAAGGTTTGGGGCAG[CG]G[CG]TTGCAGGAGATGAGCTCAG[
[CG]]CAAAGGGAACCC[CG]CAG[CG]G[CG]AGTG[[CG]]GC
TGCTGGCCTG[CG][CG]CTGTGGCCCCAACAGGCTGGCAGGG[C
G][CG]GG[CG]GGTGG[CG]GGGTTG[CG]GTATGAGCTTTG
SEQ ID NO: 5362
CTGGTAA[CG]A[CG]ACAGCAC[CG]GC[CG]CC[CG]GCCACC
[CG]GTCCCCCTCCATGCT[CG]CT[CG]GC[CG]TG[CG]CTTA
CC[CG]CTGCACAA[CG][CG]TCC[CG]CCC[CG]GCCTCCAGC
CCACTCTC[CG][CG]C[CG][CG]CCAGCCT[CG]AACCTGGAT
CTC[CG][CG]GG[CG]CCTGGG[CG]GGG[CG]GGACTCCAGGC
CCACCCAGCAAGCTAATTGGCTGAGGCCCT[CG]GCTGGGGACCA
ATCAC[CG]GCTCTGAGAAAGTT[CG]GCAGTGGCCACCACATCT
GGTTCT[CG]TTAACTTTTCTAAGGCAG[[CG]]GC[CG]CTGGA
GCAG[[CG]]GGGCTGG[CG]GGGTAAAAGCTCCTGGCCAGGGCT
GCCTGGAGCTGCCCCTTCCACTC[CG]CCCCCAGGGAGCTCC[CG
]GGTCATCCTCTCATC[CG]GGCTGCCC[[CG]][CG]GCCCCCA
AGGAGCCCCACCCC[CG]GGACCAAATGGCC[CG]CAAGGTTTGG
GGCAG[CG]G[CG]TTGCAGGAGATGAGCTCAG[[CG]]CAAAGG
GAACCC[CG]CAG[CG]G[CG]AGTG[CG]GCTGCTGGCCTG[CG
][CG]CTGTGGCCCCAACAGGCTGGCAGGG[CG][CG]GG[CG]G
GTGG[CG]GGGTTG[CG]GTATGAGCTTTGCTCCCTGCCCT
SEQ ID NO: 5363
TTGTGG[CG]A[CG]CCATTTCCCTG[CG]CCCCCAG[CG][CG]
GC[CG]CTTGGCTTTTGTTTGAGGTGA[CG]CTGGG[CG]GCAGC
ATCCTTCCCTCAGCCCTGGGGACCAG[CG]GGGACTACAGAACCC
AGAAGGTTTTGTCTCCAGC[[CG]]CAGGGATGCTGAGCCAATC[
[CG]][CG]CTGAGAAAAGGGT[CG]TTTC[[CG]]CTTTGGGAC
CAATGGGT[CG]GGGAGGGACTTC[CG]GTATCACTTCAGTGG[[
CG]]GTCATTTTTGCAG[CG]CTTGGGTGCATCCAGAC[CG]TCA
GAGCTTTGGGAG[CG]CTTTGTTTGG[[CG]]ACAGT[CG]GAAG
G[CG][CG]AGGGGAGGGGTCCTCC[CG]CTGAACAGTGGGGGTT
CTAAGGGT[CG]G[CG]G[CG]G[CG]GGGTTGA[[CG]]GCTTT
GCCTAGGTCCCTC[CG]CC[CG]TAGCTGT[CG]GGTCC[CG]GC
CC[CG]CTCTGCCCACAGACTC[CG]ATGGCTG[CG]GC[CG][C
G]CTGAGGGCCC[CG]ACTCAGGTGAG[CG]CTGCCTCTACTGGG
CCTCACCCTCCATCCCCAAATTAGTGCCTTCTTGGGTCACTA[CG
]GT[CG]AGATCCTCATGTCCAGTACAGTGGGGGCT[CG]TGGGT
GGGGTCCCTATTTCCAGAACTTGGG
SEQ ID NO: 5364
TGGAAGTGCTGGAAGAAGG[CG]GAGATG[CG]AGTGATCTGCAG
GCTCAGGCACCTGGAGG[CG]CAG[CG]AG[CG][CG]CTGGA[C
G]CTCC[CG]GCAGACAG[CG]ACT[CG]TCCAGC[CG]C[CG][
CG]CAGCAGC[CG][CG]C[CG]GGGC[CG]GC[CG]CCAGGCAG
C[CG]CTGGAGGC[CG]CCAGCCAGAGGCAGAGGGTCAGGAC[CG
][CG]C[CG]GGCACCC[CG]GGCACCATGGCTG[CG]GGT[CG]
AGGG[CG]AGGG[CG]AGGG[CG]C[CG]GG[CG][CG]GGC[CG
]AGGCTCCCTGCTC[CG][CG]C[CG]GGGCTGCACTGCTGAGGA
CCAGGCAGA[CG]C[CG][CG]ACTGAGC[CG]GAAAGTTCAATC
CTTCAACTC[CG]GC[CG]GACCCTCCT[CG]C[CG]ACCTCCCT
CCCAGCT[CG]CCCT[CG]AGGGGTGGGGTGAGGGGGACAGGAGG
C[CG]CACCATTGGCTGGAAGG[CG]TGTGAGTGACAGGGGGGC[
[CG]]GG[CG]CAGGGCCCATGGGC[CG]GTCT[[CG]]TCAGCT
G[CG]AGCC[CG]GG[CG]CTC[CG]GGGGAGGG[CG]A[CG]C[
CG]AG[CG]GCTTTCCA[CG]C[CG][[CG]]CAGGTCT[CG]AG
GGGCCCAGCTCCCA[CG]CAGG[CG]CCTCTCC[CG]TT[CG]CA
CCAAC[CG]CTTCCTGCCCCTCCC
SEQ ID NO: 5365
TT[CG]GGTCTCTCCTGGCTGTGCAAG[CG]ATGGGCCAGAGGGC
TGGA[CG]AGGCTGGCTCCCAATCCAGAATCC[CG]AGCTGGGGA
GTTCTCTCTAGGTTCTGGGGCTCCTGGGAC[CG]GGGCTTTGGGG
AAGGGAGAT[CG]CAGGA[CG]GATATCCAGGAAGGGAGGGGGCC
CTGGGTCTCC[CG]TTACCTG[CG]CCTGC[CG][CG]CTGGGAC
TC[CG]CTCTGGGGGCTGCAGCT[CG]AAGCTC[CG]ACAAGTCT
CCA[CG]TCCAGCC[CG]AGAGGGGG[CG]GC[CG]GGCC[CG]G
CACAG[CG]AGG[CG]AGGAC[CG][CG]AG[CG]CCTCCTGGCA
C[CG]AGGCC[CG]C[CG]GCCCCCCACACTC[CG]CTCATGCCC
TAGACACCCAGGCTTGC[CG]AGCAGCAGCT[CG]AACC[CG][C
G]CCC[CG]GC[CG]CACTGGGG[CG]GGGCA[[CG]]A[[CG]]
GCCCCAAGAAGACCCTCCCTGCAG[[CG]]GCCCCCTG[CG]GCT
C[CG]CTCTGCTTTTAATCACTTCCC[CG]CAGGGTCCC[CG]CC
CCTCA[CG]TGGCATCC[CG][CG]GCAGCTGG[CG]AGTCTGG[
CG]CCT[CG][CG]GC[CG]CCCCCTCTACACTCAGGGACTGGCC
TGAGTC[CG]GGGGGTGGGGGTTT[[CG]]AGG[[CG]]GG
SEQ ID NO: 5366
GC[CG]TG[CG]CTTACC[CG]CTGCACAA[CG][CG]TCC[CG]
CCC[CG]GCCTCCAGCCCACTCTC[CG][CG]C[CG][CG]CCAG
CCT[CG]AACCTGGATCTC[CG][CG]GG[CG]CCTGGG[CG]GG
G[CG]GGACTCCAGGCCCACCCAGCAAGCTAATTGGCTGAGGCCC
T[CG]GCTGGGGACCAATCAC[CG]GCTCTGAGAAAGTT[CG]GC
AGTGGCCACCACATCTGGTTCT[CG]TTAACTTTTCTAAGGCAG[
[CG]]GC[CG]CTGGAGCAG[[CG]]GGGCTGG[CG]GGGTAAAA
GCTCCTGGCCAGGGCTGCCTGGAGCTGCCCCTTCCACTC[CG]CC
CCCAGGGAGCTCC[CG]GGTCATCCTCTCATC[CG]GGCTGCCC[
[CG]][CG]GCCCCCAAGGAGCCCCACCCC[CG]GGACCAAATGG
CC[CG]CAAGGTTTGGGGCAG[CG]G[CG]TTGCAGGAGATGAGC
TCAG[CG]CAAAGGGAACCC[CG]CAG[CG]G[CG]AGTG[CG]G
CTGCTGGCCTG[CG][CG]CTGTGGCCCCAACAGGCTGGCAGGG[
CG][CG]GG[CG]GGTGG[CG]GGGTTG[CG]GTATGAGCTTTGC
TCCCTGCCCTGGGGTCC[CG]GG[CG]CTCCTGGCTCTGGAGGCC
TGGCCAT[CG]GTC[CG]AAAAGCAAAGGGA
SEQ ID NO: 5367
GA[CG]CCATTTCCCTG[CG]CCCCCAG[CG][CG]GC[CG]CTT
GGCTTTTGTTTGAGGTGA[CG]CTGGG[CG]GCAGCATCCTTCCC
TCAGCCCTGGGGACCAG[CG]GGGACTACAGAACCCAGAAGGTTT
TGTCTCCAGC[CG]CAGGGATGCTGAGCCAATC[[CG]][CG]CT
GAGAAAAGGGT[CG]TTTC[CG]CTTTGGGACCAATGGGT[CG]G
GGAGGGACTTC[CG]GTATCACTTCAGTGG[CG]GTCATTTTTGC
AG[CG]CTTGGGTGCATCCAGAC[CG]TCAGAGCTTTGGGAG[CG
]CTTTGTTTGG[CG]ACAGT[CG]GAAGG[CG][CG]AGGGGAGG
GGTCCTCC[CG]CTGAACAGTGGGGGTTCTAAGGGT[CG]G[CG]
G[CG]G[CG]GGGTTGA[[CG]]GCTTTGCCTAGGTCCCTC[CG]
CC[CG]TAGCTGT[CG]GGTCC[CG]GCCC[CG]CTCTGCCCACA
GACTC[CG]ATGGCTG[CG]GC[CG][CG]CTGAGGGCCC[CG]A
CTCAGGTGAG[CG]CTGCCTCTACTGGGCCTCACCCTCCATCCCC
AAATTAGTGCCTTCTTGGGTCACTA[CG]GT[CG]AGATCCTCAT
GTCCAGTACAGTGGGGGCT[CG]TGGGTGGGGTCCCTATTTCCAG
AACTTGGGTGATGGG
SEQ ID NO: 5368
[CG]ACTCCC[CG]TGTGGGAAGAGCT[CG]TCTGGGTGCAG[CG
]C[CG][CG]GCC[CG]CAACATTAGCAA[CG]GCAGCAGCAGTA
GCACTGGTAA[CG]A[CG]ACAGCAC[CG]GC[CG]CC[CG]GCC
ACC[CG]GTCCCCCTCCATGCT[CG]CT[CG]GC[CG]TG[CG]C
TTACC[CG]CTGCACAA[CG][CG]TCC[CG]CCC[CG]GCCTCC
AGCCCACTCTC[CG][CG]C[CG][CG]CCAGCCT[CG]AACCTG
GATCTC[CG][CG]GG[CG]CCTGGG[CG]GGG[CG]GGACTCCA
GGCCCACCCAGCAAGCTAATTGGCTGAGGCCCT[CG]GCTGGGGA
CCAATCAC[[CG]]GCTCTGAGAAAGTT[CG]GCAGTGGCCACCA
CATCTGGTTCT[CG]TTAACTTTTCTAAGGCAG[[CG]]GC[CG]
CTGGAGCAG[CG]GGGCTGG[CG]GGGTAAAAGCTCCTGGCCAGG
GCTGCCTGGAGCTGCCCCTTCCACTC[CG]CCCCCAGGGAGCTCC
[CG]GGTCATCCTCTCATC[CG]GGCTGCCC[[CG]][CG]GCCC
CCAAGGAGCCCCACCCC[CG]GGACCAAATGGCC[CG]CAAGGTT
TGGGGCAG[CG]G[CG]TTGCAGGAGATGAGCTCAG[[CG]]CAA
AGGGAACCC[CG]CAG[CG]G[CG]AGTG[[CG]]GCTGCTGGCC
SEQ ID NO: 5369
C[CG][CG]CATCAGG[[CG]]CTGTTGTTGGAGC[CG]GAACAC
[CG]TG[CG]ACTCTGAC[CG]AAC[CG]GCCCCCTCCT[CG][C
G]CACACACT[CG]C[CG]AGC[CG][CG][CG][CG]CCCCTC[
CG]C[CG]TGACAGTGGC[CG]TGGCCTC[CG]CTCTCT[CG]GG
GCACC[CG]GCAGCCAGAG[CG]CAG[CG]AGAG[CG]GG[CG]G
T[CG]CCAGGGTCCCCTCCCCAGCCAGTCCCAGG[CG]CC[CG]G
TGCACTATG[CG]GGGCA[[CG]]TG[CG]CCCCCCAGCTCTAAT
CTG[CG][CG]CTGACAGGAGCATGATCTGTGCCCAGGCCAGGGC
TGCCAAGGTAAG[[CG]]GG[CG]TAG[CG][CG]GGGACACTGT
CTGC[CG]CCCCTTCCCCCC[CG]CCCTTCTCTGGG[CG]GCTTC
CC[CG]C[CG]CA[CG][CG]AGGCCC[CG]GCAG[CG]CCCTCC
CTTCT[CG]GGGC[CG]AGATCCACCCTCCTCCCCACCCTCT[CG
]CTTCTCC[CG][CG]AGGTTCAATTGTCAGCCTGGGT[CG][CG
]C[CG]C[CG]CC[CG]GTC[CG]GGC[CG]GCATCCC[CG]GGT
GG[CG]ACCC[CG]GCTTGGGTACTGCAGG[CG]CACC[CG]GCC
CTCCTG[CG]GGGTA[CG]GAGAGAAACAAAGAAGCCCCCAAG[C
G]GGTT[CG]CAG[CG]CCTCCCC
SEQ ID NO: 5370
GGTACCCACAGAGGAGCAGGCAGGGAGGGAGGGGATGCAAG[CG]
GGAGGATAAAG[CG]ATGAAGTGTGCTG[CG]TTAC[CG][CG]C
ATCAGG[CG]CTGTTGTTGGAGC[CG]GAACAC[CG]TG[CG]AC
TCTGAC[CG]AAC[CG]GCCCCCTCCT[CG][CG]CACACACT[C
G]C[CG]AGC[CG][[CG]][CG][CG]CCCCTC[CG]C[CG]TG
ACAGTGGC[CG]TGGCCTC[CG]CTCTCT[CG]GGGCACC[CG]G
CAGCCAGAG[CG]CAG[CG]AGAG[CG]GG[CG]GT[CG]CCAGG
GTCCCCTCCCCAGCCAGTCCCAGG[CG]CC[CG]GTGCACTATG[
CG]GGGCA[CG]TG[CG]CCCCCCAGCTCTAATCTG[CG][CG]C
TGACAGGAGCATGATCTGTGCCCAGGCCAGGGCTGCCAAGGTAAG
[CG]GG[CG]TAG[CG][CG]GGGACACTGTCTGC[CG]CCCCTT
CCCCCC[CG]CCCTTCTCTGGG[CG]GCTTCCC[CG]C[CG]CA[
CG][CG]AGGCCC[CG]GCAG[CG]CCCTCCCTTCT[CG]GGGC[
CG]AGATCCACCCTCCTCCCCACCCTCT[CG]CTTCTCC[CG][C
G]AGGTTCAATTGTCAGCCTGGGT[CG][CG]C[CG]C[CG]CC[
CG]GTC[CG]GGC[CG]GCATCCC[CG]GGTGG[CG]ACCC[CG]
GCTTGGGTACTG
SEQ ID NO: 5371
T[CG]GT[CG]CTGTTGGACTCCCT[CG]CCTGC[CG]CTTCTGC
[CG]GATCAAGGAGCTGGCTAT[CG]C[CG]CAGCCATAGCTGCT
CAG[[CG]]AGGGCCTCAGGCCCCAGCCTCTACTG[CG]CCCTC[
CG]GCTTG[CG]CTC[CG]C[CG]GGG[CG]AGGGCAGGACCTGG
G[CG]GCCAGGGAAAGGGCAGT[CG][CG]GGGAGGCAGTGCTAA
AATTTGAGGAGGCTGCAGTAT[CG]AAAACC[CG]G[CG]CTCAC
AAGGTTAGTCAAAGTCTGGGCAGTGG[CG]ACAAAATGTGTGAAA
ATCCAGATGTAAACTTCCCCAACCTCTGG[[CG]]GC[CG]GGGG
G[CG]GGG[CG]GGG[CG]GTCCCAGGCCCTCTTG[CG]AAGTAG
A[CG]TTTGCACCCCAAACTTGCACCCCAAGG[CG]AT[CG]G[C
G]TCCAAGGGGCAGTGGGGAGTTTAGTCACACTG[CG]TT[CG]G
GGTACCAAGTGGAAGGGGAAGAA[CG]ATGCCCAAAATAACAAGA
[CG]TGCCTCTGTTGGAGAGG[CG]CAAG[CG]TTGTAAGGTGTC
CAAAGTATACCTACACATACATACATAGAAAACC[CG]TTTACAA
AGCAGAGTCTGGACCCAGG[CG]GGTAG[CG][CG]CCCC[CG]G
TAGAAAATACTAA
SEQ ID NO: 5372
TGAACACCC[CG]AGGA[CG]TGCCTCT[CG]CACAGGGAG[CG]
CC[CG]TCTTTGCTGGGGCTGGAG[CG]G[CG]CTTGGAGGC[CG
]ACACT[CG]GT[CG]CTGTTGGACTCCCT[CG]CCTGC[CG]CT
TCTGC[CG]GATCAAGGAGCTGGCTAT[CG]C[CG]CAGCCATAG
CTGCTCAG[[CG]]AGGGCCTCAGGCCCCAGCCTCTACTG[CG]C
CCTC[CG]GCTTG[CG]CTC[CG]C[CG]GGG[CG]AGGGCAGGA
CCTGGG[CG]GCCAGGGAAAGGGCAGT[CG][CG]GGGAGGCAGT
GCTAAAATTTGAGGAGGCTGCAGTAT[CG]AAAACC[CG]G[[CG
]]CTCACAAGGTTAGTCAAAGTCTGGGCAGTGG[CG]ACAAAATG
TGTGAAAATCCAGATGTAAACTTCCCCAACCTCTGG[CG]GC[CG
]GGGGG[CG]GGG[CG]GGG[CG]GTCCCAGGCCCTCTTG[CG]A
AGTAGA[CG]TTTGCACCCCAAACTTGCACCCCAAGG[CG]AT[C
G]G[CG]TCCAAGGGGCAGTGGGGAGTTTAGTCACACTG[CG]TT
[CG]GGGTACCAAGTGGAAGGGGAAGAA[CG]ATGCCCAAAATAA
CAAGA[CG]TGCCTCTGTTGGAGAGG[CG]CAAG[CG]TTGTAAG
GTGTCCAAAGTATACCTAC
SEQ ID NO: 5373
CTGGCTCAGCTCTGCA[CG]CCCCCCAGCTAGCTCC[CG]CTCTA
GTCACCTCTTCCC[CG][CG]CCCC[CG]CCCCTCTAGAGCT[CG
][CG]CC[CG]CCCCCCCCCACC[CG][CG]CCTCCTCTGCC[CG
]CCCTCCTCCCCCTCCCCCTTCCCTCCTGCCCTCCCTTCATTCCA
CAAGTGT[CG]CTT[CG]CTCTCTTCAG[CG]CACTTGG[CG]AG
CTGGTGAGGTGAGAGGGATACTG[CG]AGAGGGCTAGGGG[CG]G
CCAGTC[CG]GGGCTGC[[CG]]GCCAAGGCTAGG[CG]CTGCCA
GCC[CG]ATTCTCCTCTGCTCTCCACCCC[CG]CCTCACCCAGTG
GC[CG]GC[CG]GACCTGCACCC[CG][CG]CTTGACCC[CG]CT
CATCCTCCCCC[CG]CC[CG]GC[CG]GG[CG][CG]CTCCTCCC
[CG]GC[CG]GCCCCT[CG]G[CG][CG][CG]G[CG][CG]CTG
GAGG[CG]AA[CG][CG]GGCTGAGG[CG]AA[CG][CG]GGCTG
AGC[CG]AG[CG]CAGTGGC[CG]C[CG]ACCAC[CG]AG[CG]C
CC[CG][CG]C[CG]CTCCCTGCATGTG[CG]GCC[CG][CG]G[
CG]GCT[CG]CAGCTCC[CG]GCAGCAGCCT[CG]GCAGCTT[CG
]GC[CG][CG]CCT[CG]AGAGG[CG]GC[CG]CAGAGGCTCCAG
[CG]G[CG]GC[CG]AG[CG]GC[CG]A
SEQ ID NO: 5374
GGACTCTCTTTACTT[CG]GCTAGGCAC[CG]GCT[CG]GTTCAT
CC[CG]CA[CG][CG]GGG[CG]G[CG]GGGCTGGGCTGGGAAAA
GGTCTTAG[CG]GGGTGCAAACTCAGAGAGCCAG[CG]CTGTTTG
GGAAAGCAGCAGGTTAAAGATGCTGAGT[CG]GGTTGGAAGGGCT
TCTCT[CG]GGCAG[CG]TATGA[CG]GCTTGAGGGAGGGCACCA
GGCACAGGGAGCAGGACTTGG[CG]CTGCTCAGGCTGCACTCTCC
A[CG][CG]GGCAC[CG]TAAGGC[CG]GG[CG][CG]AC[CG]G
GAGGCCC[CG]AGAGAA[CG]CC[CG]GCCCCAGA[CG]CTGGAG
CTGCTCTCTGCCCCCTGCTGTTGCCTCTAC[CG]CAAATGGGTTT
GAGACTGGCAGAGTCAAAAGCC[CG]GCTGGCTTGGGAAAACT[C
G]GGCCAAGCAAAGGGAATGTCCTTTAAGGGTGAAACCTGAAATC
CAGCCC[CG]CATGATCC[[CG]]CACAGG[CG]AGCTGCATC[C
G]GGAGG[CG][CG]AGCTTCAGTG[CG]GAGGCCAGTGTCACCT
TAGAGGAGCTCTCCCTATTGGCTCTTAAA[CG]CCCAGAAAAGTC
CAGTTTCCCTTCCCCATCCTCAC[CG]ACCAACCT[CG][CG]AC
CCATGAA
SEQ ID NO: 5375
GGCTCACAGGCAGTCACACACCTATA[CG]GGCTGACAC[CG]CT
AAGTGAACAGGTGCAGACACAATGGCACT[CG]GGGA[CG]GGCT
CACA[CG][CG]GTCACACACCTGCAGGAACA[CG][CG]CACAC
TACACAC[CG]TTGCTCT[CG]CCTCC[CG]GTATCACCTT[CG]
AA[CG][CG]CTGGC[CG]GCCCCCTCCTAGCCTGGTGCAGT[CG
]GCTC[CG]CTTCTACTCAGTCT[CG]GGTCCTCCTGGGCCAA[C
G]CAGACCCTGGTGCCTCCTTCCTTAGA[CG]AGCTAAGGTCAAG
ACTTCTGCTGCTG[CG]GAGGAGCC[CG][CG]CACCAGGC[CG]
GGGTGGACTG[CG]CCTG[CG]CAT[CG]GGCC[CG]CCTGGTTC
TTAGGAACTA[CG]ACTCCCAGGGGG[CG]CTG[CG][CG]CT[[
CG]]C[CG]GCAC[CG][[CG]]ACTAAAGCTTGCAAAGCCTGGG
TCAT[[CG]]AAACTACAACTCCCAGAAGGCTAAG[[CG]]TCTG
CACA[CG]CTAGGTC[CG]CAGGG[CG]CTGACCCCTGGGGGCC[
CG]AGGAG[CG]C[CG]GGCTGCTGCCC[CG]AGCCC[CG]CCCA
CTACAGCCTCAGTGCATGG[CG]GTGGG[CG]CTTCCAGTAACTC
AGGGGTGGGACTTTTTTCTTGCTCAGGGG
SEQ ID NO: 5376
AGGGGCTTTCCAGA[CG]TGAGTTATCTTTACCTTTCCTTGACTA
GCTAATTCAAGACAACTAGGTAGAAGCCCTTTCTCAGCCTCCCCT
CTT[CG]CTCATCTTT[CG]AGTTCTTGGCCACCCCAGTTCAAAC
ACCAGCACCATTGCCCTCCTCTCAGGTGGCTGCTGCTTAATTTCC
CCTCCACTTTAGTAGTTCTTCTCTTGCCT[CG]CTAGAAGGACTG
GTGTTGGGTGCTTGGAATTCTGGCTATTTTCCTCCTGC[CG]TTC
[CG]ACT[CG]GCACCAGAGTCTGTCTCTACTGAGAA[CG]CAG[
CG][CG]TCAGGGC[CG]AGCTCTTCACTGGCCTGCTC[CG][CG
]CTCTTCAATGCCAG[CG]CCAGG[CG]CTCACCCTGCAGAG[CG
]TCC[CG]CCTCTCAAAGAGGGGTGTGACC[CG][CG]AGTTTAG
ATAGGAGGTTCCTGC[CG]TGGGGAACACCC[CG]C[CG]CCCT[
CG]GAGCTTTTTCTGTGG[CG]CAGCTTCTC[CG]CC[CG]AGC[
CG][CG][CG][CG]GAGCTGC[CG]GGGGCTCCTTAGCACC[CG
]GG[CG]C[CG]GGGCCCT[CG]CCCTTC[CG]CAGCCTTCACTC
CAGCCCTCTGCTCC[CG]CA[CG]CCATGAAGT[CG]C[CG]TTC
TAC
SEQ ID NO: 5377
GAGC[CG]C[CG]AGCTCCTCCC[CG]CC[CG]CCCCCACACCCC
ACCCCCAC[CG]CTGCACTAACCC[CG]GCTCAGCTGGCTC[CG]
[CG]CACTTGCT[CG]GAGGAGC[CG]GGGC[CG]AG[CG]GAC[
CG]C[CG]GCTGCAGGCAG[CG]AG[CG][CG]GCTGGGCTG[CG
]GGGCTGCTTCCC[CG][CG]TCCTC[CG]GGCC[CG]GGC[CG]
CCCTCCTCC[CG]CACAGTG[CG]GAGCAGGGAGGCCC[CG][CG
]CCT[CG]ACCACC[CG][CG]CC[CG]AG[CG]TC[CG][CG]C
CTCCTCCTC[CG]CTCTGCAGG[CG]GGGAC[CG]CC[CG]G[CG
]CT[CG]GCACC[CG]GCAG[CG][CG]GCCCCCTCCAGCCCC[C
G]GCTCC[CG]GCAGCAGAAGCAGAAGGCAG[CG]CCAGGGGC[C
G]C[CG]C[CG]C[CG]C[CG]AGCTC[CG][CG]GGGCT[CG]G
GAGC[CG]GCCC[CG]G[CG]AGGAGG[CG][CG]GAACCATGGC
[CG]ATGGGGG[CG]AGGG[CG]AAGA[CG]AGATCCAGTTCCTG
[CG]AACTGTAAG[CG]C[CG]TG[CG]T[CG][CG]TGTGCTGT
CAGGGGAAGGGGG[CG]TCAGGGCATCCACTAG[CG]GGGTC[CG
]GGCAGAGTGACAG[[CG]]GGCAG[CG]GGGACT[CG][CG]GG
[CG]GGG[CG]AGGGGGTGCCCCCTGAGGATG[[CG]]GGAG
SEQ ID NO: 5378
TCCTTGACTAGCTAATTCAAGACAACTAGGTAGAAGCCCTTTCTC
AGCCTCCCCTCTT[CG]CTCATCTTT[CG]AGTTCTTGGCCACCC
CAGTTCAAACACCAGCACCATTGCCCTCCTCTCAGGTGGCTGCTG
CTTAATTTCCCCTCCACTTTAGTAGTTCTTCTCTTGCCT[CG]CT
AGAAGGACTGGTGTTGGGTGCTTGGAATTCTGGCTATTTTCCTCC
TGC[CG]TTC[CG]ACT[CG]GCACCAGAGTCTGTCTCTACTGAG
AA[CG]CAG[[CG]][[CG]]TCAGGGC[CG]AGCTCTTCACTGG
CCTGCTC[CG][[CG]]CTCTTCAATGCCAG[CG]CCAGG[CG]C
TCACCCTGCAGAG[[CG]]TCC[CG]CCTCTCAAAGAGGGGTGTG
ACC[CG][CG]AGTTTAGATAGGAGGTTCCTGC[CG]TGGGGAAC
ACCC[[CG]]C[CG]CCCT[CG]GAGCTTTTTCTGTGG[CG]CAG
CTTCTC[CG]CC[CG]AGC[CG][CG][CG][CG]GAGCTGC[CG
]GGGGCTCCTTAGCACC[CG]GG[CG]C[CG]GGGCCCT[CG]CC
CTTC[CG]CAGCCTTCACTCCAGCCCTCTGCTCC[CG]CA[[CG]
]CCATGAAGT[CG]C[CG]TTCTAC[CG]CTGCCAGAACACCACC
TCTGTGGAAAAAGGCAA
SEQ ID NO: 5379
TCAGGGGCTTTCCAGA[CG]TGAGTTATCTTTACCTTTCCTTGAC
TAGCTAATTCAAGACAACTAGGTAGAAGCCCTTTCTCAGCCTCCC
CTCTT[CG]CTCATCTTT[CG]AGTTCTTGGCCACCCCAGTTCAA
ACACCAGCACCATTGCCCTCCTCTCAGGTGGCTGCTGCTTAATTT
CCCCTCCACTTTAGTAGTTCTTCTCTTGCCT[CG]CTAGAAGGAC
TGGTGTTGGGTGCTTGGAATTCTGGCTATTTTCCTCCTGC[CG]T
TC[CG]ACT[CG]GCACCAGAGTCTGTCTCTACTGAGAA[CG]CA
G[[CG]][[CG]]TCAGGGC[CG]AGCTCTTCACTGGCCTGCTC[
CG][[CG]]CTCTTCAATGCCAG[CG]CCAGG[CG]CTCACCCTG
CAGAG[[CG]]TCC[CG]CCTCTCAAAGAGGGGTGTGACC[CG][
CG]AGTTTAGATAGGAGGTTCCTGC[CG]TGGGGAACACCC[CG]
C[CG]CCCT[CG]GAGCTTTTTCTGTGG[CG]CAGCTTCTC[CG]
CC[CG]AGC[CG][CG][CG][CG]GAGCTGC[CG]GGGGCTCCT
TAGCACC[CG]GG[CG]C[CG]GGGCCCT[CG]CCCTTC[CG]CA
GCCTTCACTCCAGCCCTCTGCTCC[[CG]]CA[CG]CCATGAAGT
[CG]C[CG]TTCTAC
SEQ ID NO: 5380
AGATCTGGG[CG]G[CG]G[CG]GC[CG]AAAGCAG[CG]A[CG]
[CG]CC[CG]GAGCATCCCTTG[CG]ATA[CG]CTAGGGGA[CG]
GTGCTTTCTCTGTCCCAGTTG[CG]TG[CG]G[CG]GGGCTGGGG
CCCAGGC[[CG]]CCCCAAATCTCCCCCACTAGAGTGACCAC[CG
]CACAGTTGTCCC[CG]CTGGG[CG][CG]CTCCTC[CG]GTGTC
TG[CG]CTCAGC[CG]CTCTCCTCTTCTCTCTCC[CG]CC[CG]C
C[CG]CAG[CG]CCATGGTCTGGCAGTGTGTTTAG[[CG]]CTCA
CCACCATGTGCACCAGCTTGTTGCTAGTGTACAGCAGCCT[CG]G
[[CG]]GCCAGAAGGAG[CG]GCCCC[CG]CAGCAGCAGCAGCAG
CAGCAGCAACAGCAGCAGCAGG[CG]T[CG]GCCAC[CG]GCAGC
T[CG]CAGC[CG]G[CG]G[CG]GAGAGCAGCACCCAGCAG[CG]
CCC[CG]GGGTCCC[CG][CG]GGAC[CG][CG]GCCACTGGA[C
G]GATACCT[CG]GAGTGG[CG]GACCACAAGGTGACAGCATGCC
[CG]CCAGCC[CG]CT[CG]CCACTCAGCCTGGGGATCC[CG]CA
CACCTGAGCCTTCCCCCTTTCC[CG]GGGCTGGGAGG[CG]CTGT
GAGTAGGTGC[CG]TT[CG]AAGGCTGGAGGGGAGTGGACC
SEQ ID NO: 5381
TGCAAGGAT[CG]CAAGGATCCAGGGCCCCAGGAAAGGAGGGGTG
TGAAGGACTCAAAATTCCAGCAGCTTGGCTGGGGTGGCTG[CG]C
CAGA[CG]GGCCCTTCCCCAAAGTGCAAACCCACCCCTGTCCT[C
G]GCCC[CG]G[CG][CG]CTCCCTCCCTCAGCC[CG]GGGC[CG
]TACACCACCTGCCCTCTAC[CG]AGAGATCTGGG[CG]G[CG]G
[CG]GC[CG]AAAGCAG[CG]A[CG][CG]CC[CG]GAGCATCCC
TTG[CG]ATA[CG]CTAGGGGA[CG]GTGCTTTCTCTGTCCCAGT
TG[CG]TG[CG]G[CG]GGGCTGGGGCCCAGGC[[CG]]CCCCAA
ATCTCCCCCACTAGAGTGACCAC[CG]CACAGTTGTCCC[CG]CT
GGG[CG][CG]CTCCTC[CG]GTGTCTG[CG]CTCAGC[CG]CTC
TCCTCTTCTCTCTCC[CG]CC[CG]CC[CG]CAG[CG]CCATGGT
CTGGCAGTGTGTTTAG[[CG]]CTCACCACCATGTGCACCAGCTT
GTTGCTAGTGTACAGCAGCCT[CG]G[CG]GCCAGAAGGAG[CG]
GCCCC[CG]CAGCAGCAGCAGCAGCAGCAGCAACAGCAGCAGCAG
G[CG]T[CG]GCCAC[CG]GCAGCT[CG]CAGC[CG]G[CG]G[C
G]GAGAGCAGCACCCAGCAG[CG]CCC
SEQ ID NO: 5382
G[CG]CTCCCTCCCTCAGCC[CG]GGGC[CG]TACACCACCTGCC
CTCTAC[CG]AGAGATCTGGG[CG]G[CG]G[CG]GC[CG]AAAG
CAG[CG]A[CG][CG]CC[CG]GAGCATCCCTTG[CG]ATA[CG]
CTAGGGGA[CG]GTGCTTTCTCTGTCCCAGTTG[CG]TG[CG]G[
CG]GGGCTGGGGCCCAGGC[[CG]]CCCCAAATCTCCCCCACTAG
AGTGACCAC[CG]CACAGTTGTCCC[CG]CTGGG[CG][CG]CTC
CTC[CG]GTGTCTG[CG]CTCAGC[CG]CTCTCCTCTTCTCTCTC
C[CG]CC[CG]CC[CG]CAG[CG]CCATGGTCTGGCAGTGTGTTT
AG[CG]CTCACCACCATGTGCACCAGCTTGTTGCTAGTGTACAGC
AGCCT[CG]G[[CG]]GCCAGAAGGAG[CG]GCCCC[CG]CAGCA
GCAGCAGCAGCAGCAGCAACAGCAGCAGCAGG[CG]T[CG]GCCA
C[CG]GCAGCT[CG]CAGC[CG]G[CG]G[CG]GAGAGCAGCACC
CAGCAG[CG]CCC[CG]GGGTCCC[CG][CG]GGAC[CG][CG]G
CCACTGGA[CG]GATACCT[CG]GAGTGG[CG]GACCACAAGGTG
ACAGCATGCC[CG]CCAGCC[CG]CT[CG]CCACTCAGCCTGGGG
ATCC[CG]CACACCTGAGCCTTCCCCCTTTCC[CG]GGGCT
SEQ ID NO: 5383
TTTCTCAGCCTCCCCTCTT[CG]CTCATCTTT[CG]AGTTCTTGG
CCACCCCAGTTCAAACACCAGCACCATTGCCCTCCTCTCAGGTGG
CTGCTGCTTAATTTCCCCTCCACTTTAGTAGTTCTTCTCTTGCCT
[[CG]]CTAGAAGGACTGGTGTTGGGTGCTTGGAATTCTGGCTAT
TTTCCTCCTGC[CG]TTC[CG]ACT[CG]GCACCAGAGTCTGTCT
CTACTGAGAA[CG]CAG[CG][CG]TCAGGGC[CG]AGCTCTTCA
CTGGCCTGCTC[CG][CG]CTCTTCAATGCCAG[CG]CCAGG[CG
]CTCACCCTGCAGAG[CG]TCC[CG]CCTCTCAAAGAGGGGTGTG
ACC[CG][CG]AGTTTAGATAGGAGGTTCCTGC[CG]TGGGGAAC
ACCC[CG]C[[CG]]CCCT[CG]GAGCTTTTTCTGTGG[CG]CAG
CTTCTC[CG]CC[CG]AGC[CG][CG][CG][CG]GAGCTGC[CG
]GGGGCTCCTTAGCACC[CG]GG[CG]C[CG]GGGCCCT[CG]CC
CTTC[CG]CAGCCTTCACTCCAGCCCTCTGCTCC[CG]CA[CG]C
CATGAAGT[CG]C[CG]TTCTAC[CG]CTGCCAGAACACCACCTC
TGTGGAAAAAGGCAACT[CG]G[CG]GTGATGGG[CG]GGGTGCT
CTTCAGCAC[CG]GCCT
SEQ ID NO: 5384
GCCCTCCTCTCAGGTGGCTGCTGCTTAATTTCCCCTCCACTTTAG
TAGTTCTTCTCTTGCCT[CG]CTAGAAGGACTGGTGTTGGGTGCT
TGGAATTCTGGCTATTTTCCTCCTGC[CG]TTC[CG]ACT[CG]G
CACCAGAGTCTGTCTCTACTGAGAA[CG]CAG[CG][CG]TCAGG
GC[CG]AGCTCTTCACTGGCCTGCTC[CG][CG]CTCTTCAATGC
CAG[CG]CCAGG[CG]CTCACCCTGCAGAG[CG]TCC[CG]CCTC
TCAAAGAGGGGTGTGACC[CG][CG]AGTTTAGATAGGAGGTTCC
TGC[CG]TGGGGAACACCC[CG]C[[CG]]CCCT[CG]GAGCTTT
TTCTGTGG[CG]CAGCTTCTC[CG]CC[CG]AGC[CG][CG][CG
][CG]GAGCTGC[CG]GGGGCTCCTTAGCACC[CG]GG[CG]C[C
G]GGGCCCT[CG]CCCTTC[CG]CAGCCTTCACTCCAGCCCTCTG
CTCC[CG]CA[CG]CCATGAAGT[CG]C[CG]TTCTAC[CG]CTG
CCAGAACACCACCTCTGTGGAAAAAGGCAACT[CG]G[CG]GTGA
TGGG[CG]GGGTGCTCTTCAGCAC[CG]GCCTCCTGGGCAACCTG
CTGGCCCTGGGGCTGCTGG[CG][CG]CT[CG]GGGCTGGGGTGG
TGCT[CG][CG]G[CG]TCCACT
SEQ ID NO: 5385
CCCCACTG[CG]C[CG]GG[CG]CTG[CG]GAGAG[CG]G[CG]A
GGGTGGG[CG][CG]AGG[CG]GAGAA[CG][CG]ATGAATGAGT
TCTCCCCT[CG]CCT[CG]GAGTTGTCTGAGTTGG[[CG]]G[CG
]CTG[CG]CCCAGGCTTC[CG]GCTCTCAG[CG]CCCCA[CG][C
G][CG][CG]TGGCTCCC[CG]GGCTGCCACCCA[CG]CC[CG][
CG]GC[CG]GGGC[CG]AGCCAGCCA[CG]CAGGGCAGC[CG]AG
GCTC[CG]GAGCTCCTGTCC[CG]GCCCCAGTC[CG]GGTAAAAG
GAGGGTTGTCCCCAG[CG]GAGG[CG]CACAGC[CG][CG][CG]
TTCTCCCTGCACTCTCTT[CG][CG]GTCCCATCTGTTCCCCATG
G[CG]TCTCATC[CG]CAAACC[CG]GATCCAGGCTTACCTGGAG
AAGAACAAGAT[CG]GTCCCCTGTTTGAGGTAAGG[CG]CTGTGG
AGGAGGGCAGTCC[CG]TTGTCTTTAGGGGAAGGGGTGCAGTAAT
GAAAACAGAACACTCCCAATCCCACCCCTCCCAGGGAAGGAGGGC
TAGAGAACCAA[CG][CG][CG]GGAGAGGG[CG]CCCTGGGATT
CACTGGCATT[CG]CTCTGTCC[CG]GCCAGGTGTCCTGGAA[CG
][CG]GC[CG]GG[CG]GGCACTTAGCCAGTTACCTGAA
SEQ ID NO: 5386
GAG[CG]G[CG]AGGGTGGG[CG][CG]AGG[CG]GAGAA[CG][
CG]ATGAATGAGTTCTCCCCT[CG]CCT[CG]GAGTTGTCTGAGT
TGG[[CG]]G[CG]CTG[CG]CCCAGGCTTC[CG]GCTCTCAG[C
G]CCCCA[CG][CG][CG][CG]TGGCTCCC[CG]GGCTGCCACC
CA[CG]CC[CG][CG]GC[CG]GGGC[CG]AGCCAGCCA[CG]CA
GGGCAGC[CG]AGGCTC[CG]GAGCTCCTGTCC[CG]GCCCCAGT
C[CG]GGTAAAAGGAGGGTTGTCCCCAG[CG]GAGG[CG]CACAG
C[CG][CG][CG]TTCTCCCTGCACTCTCTT[CG][CG]GTCCCA
TCTGTTCCCCATGG[CG]TCTCATC[CG]CAAACC[CG]GATCCA
GGCTTACCTGGAGAAGAACAAGAT[CG]GTCCCCTGTTTGAGGTA
AGG[CG]CTGTGGAGGAGGGCAGTCC[CG]TTGTCTTTAGGGGAA
GGGGTGCAGTAATGAAAACAGAACACTCCCAATCCCACCCCTCCC
AGGGAAGGAGGGCTAGAGAACCAA[CG][CG][CG]GGAGAGGG[
CG]CCCTGGGATTCACTGGCATT[CG]CTCTGTCC[CG]GCCAGG
TGTCCTGGAA[[CG]][CG]GC[CG]GG[CG]GGCACTTAGCCAG
TTACCTGAA[CG][CG]GACAGGTGAGCT[CG]GGAGGG
SEQ ID NO: 5387
C[CG]CCTCT[CG]AACCCTCCTTGT[CG][CG]TTCTTCC[CG]
CCC[CG]CACCTTTCTCCT[CG][CG]TTTCTGGGAAGTCAGAAG
CAAACCA[CG]AGAAAATGCCTT[CG]CAAGGAGCCTCCCTACAC
C[CG]CCCTGTCACTGAAACAAAAG[CG]TAGGGAGGAGGGAGGT
GGGAGAGGAGG[CG]GGAGGAAGGTTTAGAAAGA[CG]ATGGGGA
CAGCAGTAGGAAGGAGCTGGGGAGGGGGGTCAAGGTGGCAAGCAG
AGCTGGGGGCCCAGAGTC[CG]CTCC[CG]TGC[CG][CG][[CG
]]G[CG]AGT[CG]CTTACATGCCCAGGT[[CG]]CTGTAGGTGT
TGAAGAACTCCATCTGATTGCA[[CG]]CCTGAATCCAGCCCACC
ACCCAGGTCT[CG]TGG[CG]GGGGATGGGGGGCATGACCA[CG]
[CG]GG[CG]GAGGCTTTGAAGTAGGGGGTCTTGTAG[CG]CAGG
A[CG]ATGGG[CG]AGGTCTCCT[CG]ATG[CG][CG]TGGGGCA
CTGGT[CG]ATGGTGG[CG]CACACAT[CG]TACACCA[CG]ATG
TTCT[CG][CG]C[CG]GATC[CG][CG]CCTTGCAGGTGATGCT
TTGGATACAGCCCATCCTGCAGCC[CG]GTGC[CG]GCA[CG]G[
CG][CG]G[CG]TGGGGCAG[CG][CG]GGGGC
SEQ ID NO: 5388
GCCC[CG]CACCTTTCTCCT[CG][CG]TTTCTGGGAAGTCAGAA
GCAAACCA[CG]AGAAAATGCCTT[CG]CAAGGAGCCTCCCTACA
CC[CG]CCCTGTCACTGAAACAAAAG[CG]TAGGGAGGAGGGAGG
TGGGAGAGGAGG[CG]GGAGGAAGGTTTAGAAAGA[CG]ATGGGG
ACAGCAGTAGGAAGGAGCTGGGGAGGGGGGTCAAGGTGGCAAGCA
GAGCTGGGGGCCCAGAGTC[CG]CTCC[CG]TGC[CG][CG][[C
G]]G[CG]AGT[CG]CTTACATGCCCAGGT[CG]CTGTAGGTGTT
GAAGAACTCCATCTGATTGCA[[CG]]CCTGAATCCAGCCCACCA
CCCAGGTCT[CG]TGG[CG]GGGGATGGGGGGCATGACCA[CG][
CG]GG[CG]GAGGCTTTGAAGTAGGGGGTCTTGTAG[CG]CAGGA
[CG]ATGGG[CG]AGGTCTCCT[CG]ATG[CG][CG]TGGGGCAC
TGGT[CG]ATGGTGG[CG]CACACAT[CG]TACACCA[CG]ATGT
TCT[CG][CG]C[CG]GATC[CG][CG]CCTTGCAGGTGATGCTT
TGGATACAGCCCATCCTGCAGCC[CG]GTGC[CG]GCA[CG]G[[
CG]][CG]G[CG]TGGGGCAG[CG][CG]GGGGCC[CG][CG][C
G]GGCAGC[CG]GGGG[CG]CC[CG]TCA[CG]C[CG]G
SEQ ID NO: 5389
GCCTCAGCTTCCTGAGCCTGAATCAATGCTTCTAATCA[CG]TGG
G[CG]CTCAGC[CG][CG]A[CG]GGACCACAGAAAT[CG]ACCA
G[CG]GCCTGTTTAAGGAG[CG]ACAAGGCCCAGCCCTCTCCTGC
ATTGTGG[CG]A[CG]CCATTTCCCTG[CG]CCCCCAG[CG][CG
]GC[CG]CTTGGCTTTTGTTTGAGGTGA[CG]CTGGG[CG]GCAG
CATCCTTCCCTCAGCCCTGGGGACCAG[CG]GGGACTACAGAACC
CAGAAGGTTTTGTCTCCAGC[[CG]]CAGGGATGCTGAGCCAATC
[CG][CG]CTGAGAAAAGGGT[CG]TTTC[CG]CTTTGGGACCAA
TGGGT[CG]GGGAGGGACTTC[CG]GTATCACTTCAGTGG[CG]G
TCATTTTTGCAG[CG]CTTGGGTGCATCCAGAC[CG]TCAGAGCT
TTGGGAG[CG]CTTTGTTTGG[[CG]]ACAGT[[CG]]GAAGG[[
CG]][CG]AGGGGAGGGGTCCTCC[CG]CTGAACAGTGGGGGTTC
TAAGGGT[CG]G[CG]G[CG]G[CG]GGGTTGA[[CG]]GCTTTG
CCTAGGTCCCTC[CG]CC[CG]TAGCTGT[CG]GGTCC[CG]GCC
C[CG]CTCTGCCCACAGACTC[CG]ATGGCTG[CG]GC[CG][CG
]CTGAGGGCCC[CG]ACTCAGGTGAG[CG]CTG
SEQ ID NO: 5390
CTCCTCTCAGGTGGCTGCTGCTTAATTTCCCCTCCACTTTAGTAG
TTCTTCTCTTGCCT[CG]CTAGAAGGACTGGTGTTGGGTGCTTGG
AATTCTGGCTATTTTCCTCCTGC[CG]TTC[CG]ACT[CG]GCAC
CAGAGTCTGTCTCTACTGAGAA[CG]CAG[CG][CG]TCAGGGC[
CG]AGCTCTTCACTGGCCTGCTC[CG][[CG]]CTCTTCAATGCC
AG[CG]CCAGG[CG]CTCACCCTGCAGAG[CG]TCC[CG]CCTCT
CAAAGAGGGGTGTGACC[CG][CG]AGTTTAGATAGGAGGTTCCT
GC[CG]TGGGGAACACCC[[CG]][[CG]]CCCT[CG]GAGCTTT
TTCTGTGG[CG]CAGCTTCTC[CG]CC[CG]AGC[CG][CG][CG
][CG]GAGCTGC[CG]GGGGCTCCTTAGCACC[CG]GG[CG]C[C
G]GGGCCCT[CG]CCCTTC[CG]CAGCCTTCACTCCAGCCCTCTG
CTCC[CG]CA[CG]CCATGAAGT[CG]C[CG]TTCTAC[CG]CTG
CCAGAACACCACCTCTGTGGAAAAAGGCAACT[CG]G[CG]GTGA
TGGG[CG]GGGTGCTCTTCAGCAC[CG]GCCTCCTGGGCAACCTG
CTGGCCCTGGGGCTGCTGG[CG][CG]CT[CG]GGGCTGGGGTGG
TGCT[CG][CG]G[CG]TCCACTG
SEQ ID NO: 5391
CTTTTCTTCTCT[CG]CACTCCACCTCCCACTGCCC[CG]CACCC
CCTTTAGCC[CG]GTGTTCCC[CG]CTC[CG]CTATGATTGA[CG
]TCTGGAAAGAAAGAGCTTTGTGAGGGGATGATTGTTATTAACTT
GTTATCCC[CG]G[CG]GGGGGG[CG]GGGAAC[CG]A[CG]TGC
C[CG]GGTGAG[CG]C[CG]GAGACC[CG]GAGCC[CG]GGGAG[
CG][CG]GGA[CG]AGCTACCAG[CG]CT[CG]GGTGG[CG]GC[
CG]CCAG[CG]GCCAG[CG]AAGGAGGCTG[CG][CG]CCAGCC[
CG]CC[CG][CG]G[CG]CC[CG]GGCTCAGG[CG]C[CG]TGA[
CG]GCTGCA[[CG]][CG]CTGCCC[CG]CACTCTGAGGGCCTTC
ATTAGCT[CG]CTCCC[CG][CG]C[CG]AGGCTGGGG[CG]GGC
AGCA[CG]CT[CG]GAACTTCTGATCTGTTTCTCCATACTTTCTC
CCCCTCCTACTC[CG]CAGTGTCAGGGGCTCATGTCAGAGGAGTG
[CG]GG[CG]GACTACAGCCCTGG[CG]GC[CG]GGAGGACT[CG
]CAAAGG[CG]C[CG]GGGAAGAGGGACTGGTGAGTG[CG]GAGG
GGCT[CG][CG]TGCTGGCAAGACTGGC[[CG]]TGGGGAGG[CG
]G[CG]CAGGA[CG]AAGGGC[CG]CTGTCCC[CG][[CG]]CTC
CTTCCAGGGCCC
SEQ ID NO: 5392
[CG]CTGGTAGC[CG]GG[CG]CTGCCATTCACTGCAAGGTCCTC
TG[CG]CCCTGGAATTGC[CG][CG]G[CG]G[CG]GATGCAGAG
GCCAACCCAGAGTGCAACCATGGAGA[CG][CG]A[CG]TGTGTC
CCATAGTAACCTGTTACAACATTATTTATAAGCTGCCATCCCTAG
CCTTCCCC[CG]CTTCCCCTC[CG]CTCCCT[CG]CCAGACTTG[
CG]GG[CG]A[CG]GGCACAGC[CG][CG]TCTGGCTCTTCC[CG
]GCCTCTCCCTTCTCT[CG][CG]GG[CG]CAGC[CG]ATCAATA
GTTAACACC[CG]GCTG[CG]GA[CG]G[CG]GCTCCATC[CG][
CG]GCAATCAC[CG]TAGTGCTTGTTTGTGGAAGC[CG]AG[[CG
]]TG[CG]TG[CG][CG][CG][CG][CG]CACCCAGTCCAG[CG
][CG]GAGTGGG[CG]TCTACC[CG]AGGAGGGGTGTCTGGGGAG
GGGCTGCCCT[[CG]]TTACCCAAACAGTTTG[[CG]]CT[CG]C
TTAACCTTGATGCAGCT[CG]AGGCTTCCCAGTCCAGCTCAGTTC
AGACAGAAAACCTGG[CG][CG][CG][CG][CG][CG]CACACA
CACA[CG]CCTCCCCTGG[CG]T[CG]C[CG]CC[CG]GC[CG]G
GTCCCTGCCCTTAGGGACCAGAG[CG]G[CG]AC[CG]CTGCACC
C[CG]CAC[CG]CCTGCTGGAGGAGCCCC[CG]GAGC[CG]GGGC
[CG]AGC[CG]C[CG]G[CG]TCCC[CG]AGTG[CG]CCCCCTGT
G[CG]TGC[CG]C[CG][CG]C
SEQ ID NO: 5393
GCAAGCAACAACTTTGAGGTGAGCAGCAAGTTGTGCACCTCCTCT
CAAGG[[CG]]CTGGATCAGCACCCCTGAGCTGCCCCCACAGCAC
ACACTCCCAATG[CG]AGG[CG]G[CG]G[CG]GCAGCAACAGAG
GCAGCAGCAGCAAT[CG][CG]GCAGCAG[CG]GCAGAGG[CG]G
[CG]GCAGCTG[CG][CG]CCT[CG]GGCCCAACCC[CG]CT[CG
]GCTCCCCCTCT[CG][CG]G[CG]CCCTGCCTGTCTTG[CG]TG
TG[CG]TGTG[CG]TGTGCTCAGCCTCAG[CG]TGAGGGGCACCT
GCT[[CG]]TCTGGGCTCACAG[[CG]]AAGGCAGCCT[[CG]][
CG][CG]AGCTGC[CG]CTGC[CG]CTGCTGC[CG]CCACTGGTG
TTGC[CG]CTCTCAGG[CG]CCAGGCTCCC[CG]T[CG]C[CG]C
[CG]C[CG]C[CG]CCT[CG]CCAGCCAGAGTTGGGCTC[CG]TG
GGCTTCCCCCCT[CG]CAGCCT[CG]GTCCTTCCC[CG]CTGCCT
GCAAGTCAGCCTGGCTC[CG]AGTCA[CG]TGTCAGTGCCTGAGG
CAGAGACTG[CG]AGAAAAAAA[CG][CG]CTTCATTCCTTCTTC
CAC[CG]CCATACTGTATTTTATACTAAATCTCATTTTTATTCCA
ACATTTTACTCC[CG]CT[CG]GTGAGTACCTT
SEQ ID NO: 5394
GGATGAAGCCCACCC[CG]TCCCCTTCTGGTACCAAAGTGCTTAC
TCCTCTCCAAAGTGC[CG]TGTCTGAACTGC[CG]CTGGGAAGAA
G[CG]GCTCCTGAGA[CG][CG]CCCACACCTTTCACCTGC[CG]
[CG][CG]CTTCCCCCTCCT[CG]GCCACCTTCC[CG]G[CG]GA
AGCAG[CG]AGGAGGGAGCCCCCTTTGGC[CG]TCCTC[CG]TGG
AAC[CG]GTTTTC[CG]AGGCTGGCAAAAGC[CG]AGGCTGGATT
TGGGGGAGGAATATTAGACT[CG]GAGGAGTCTG[CG][CG]CTT
TTCTCCTCCC[CG][CG]CCTCC[CG]GT[CG]C[[CG]][CG]G
GTTCAC[CG]CTCAGTCCC[CG][CG]CT[CG]CTC[CG]CACCC
CACCCACTTCCTGTGCT[CG]CC[CG]GGGGG[CG]TGTGC[CG]
TG[CG]GCTGC[CG]GAGTT[CG]GGGAAGTTGTGGCTGT[CG]A
GAATGGGGGTCTGTGGGTACCTGTTCCTGCCCTGGAAGTGCCT[C
G]TGGT[CG]TGTCTCTCAGGCTGCTGTTCCTTGTACCCACAGGA
GTGCC[CG]TG[CG]CAG[CG]GAGATGCCACCTTCCCCAAAGCT
ATGGACAA[CG]TGA[CG]GTC[CG]GCAGGGGGAGAG[CG]CCA
CCCTCAGGTAGGGAGCTGACATTGT
SEQ ID NO: 5395
TGC[CG]CAGGTGAG[CG]ATGTAACTGGAAGCCAGC[CG]GAG[
CG]TGTCCAGCTTGGAGAGCTTAGTGT[CG]GGGGGCACCCAGGG
CAGGCTGGTCTTGAGCCTGGAGAAGGCTTTGCTCAGCA[CG][CG
]CATC[CG]GGCA[CG]CTCA[CG]GG[CG]TTGGC[CG][CG]T
TC[CG]CTG[CG]ACTGCTTGCACTCTG[CG]GCTGAGCCCTTGG
C[CG]GGAGGGGCTTCTTGCCACCAC[CG]CC[CG][CG]CTACC
ACCTG[CG]C[CG]C[CG]CCCCCAGCCACA[CG]GGGC[CG]CT
TCCTCTTGCAGCCTTC[CG][CG]CTGC[CG]GCTGTGCCCAGAG
[CG]CAG[CG]CTCCTCCT[CG]C[CG]T[CG]GGGTCCTCCTCC
TCTGC[CG]A[CG]AGTTGTCACTGGG[CG]AGG[CG]TAGCTG[
CG]CTCTA[CG]C[CG][CG]GAGGGG[CG]GCCTCTTGGAGG[[
CG]]GGGAC[CG]GGTACTCC[CG]CTGCAGCCCC[CG]AAGCTC
CATCTCCTC[CG]GATCACTCAC[CG]AGCC[CG]TGGACATCC[
CG]TTGTCCCCCTTGCCCACA[CG][CG]TCCTCTTTCCTCCCCC
CTGGCCAGTCT[CG]CTGTCTC[CG]CCTTC[CG]CTCCCTGG[C
G]GAGG[CG]GAGGCCAGAGAG[CG]CTCCAAGGAAGACTAAAAA
CCCAGGC[CG]GGAAG[CG][CG]GGGTGAGAAAG[CG]AGGTGG
GTGG[CG]AGAG[CG]TGAG[CG]CCCCTCTGCTGACCC[CG]GG
GAG[CG]TGGACTA[CG]AGTTGG[CG]CCCAAGTCCAGAATC[C
G][CG][CG]CAC[CG][[CG]]GTAAGCTG[CG]CCTTTTGAAA
AGGC
SEQ ID NO: 5396
GGGT[CG]GCTGTCCTTCCCCACTGGTCACACAAGAG[CG]GC[C
G]TCCTTCCCCAGCT[CG]AAGCC[CG]TAGCACATT[CG]CAGG
CAAAGCCTCCCAAGT[CG]TCTAGGCAGTTAGGGAGCTCTG[CG]
CATTTGCCAGCA[CG]GAGGTACCTCC[CG]GGGCAGGGACACAA
CACAT[CG]CC[CG]AGAGTTTGTCCCAG[CG]AG[CG]C[CG]A
TTT[CG]TC[CG][CG]ATGCAAGTAACTGAGAT[CG]GGAGCTG
TCCC[CG]GCAGAG[CG]CACTCACCT[CG]GTCCCAGGTGGACT
GAAGTCCAGAG[CG]G[CG]CTGTGCAGCTGGAAGGG[CG][CG]
[CG]ATAGCTCAAGTTAGAGG[CG]GCCC[[CG]]GGG[CG][CG
]G[CG]CAGGACACAAGACCTCAAACTGGTACTTGCACAGGTAGC
[CG]TTGG[CG][CG]CAGGTGGCAT[CG]CATCTCCTTCCAGCC
TG[CG]GGCT[CG]ACCCCAC[CG]GTGGCCTGGAGTAC[CG][C
G]CATCTC[CG][CG][CG]GTGCAGGAG[CG]TTGGGGCTCCTC
CACCCACTGCAG[CG]TGT[CG]CTTT[CG]AGAC[CG]C[CG]G
GGT[CG]GAGGACAGCCAGGAGAAACCC[CG]CAAAGGCT[CG]T
TCTCCAGGGTGCAGTGGGAA[CG]CCTG[CG]CTCCAGTG[CG]A
CCCAGAACAGCAGGTCTTTGGAGCCCCCTC[CG]GGCCCTGGGCC
TGCC[CG]CAGGAG[CG][CG]AG
SEQ ID NO: 5397
GGTCTCCAGGG[CG]GAAAGGGGTGGAAGCTGACCCT[CG]CCCT
TCCCTCCAG[CG]CTGGCTTCAGGTGTGCCTTCTGCTACCTCCTG
TACTG[CG]AACAGGGGCC[CG]C[CG]AGCTC[CG]GGAGCCCC
TAGAAGAGGAAGACTCCTCTGGCCCCACTAGGTATCATC[CG][C
G]CTCTCC[CG]CTTTCCACCTG[CG]CCCT[CG]CTTGGGCCAA
TCTCTGC[CG]CA[CG]TGTCCATCCCTGAACTGCA[CG]CTATC
CTCCACCCC[CG]GGGGGTTCCTG[CG]CACTGAAAGAC[CG]TT
CTC[CG]GCAGGTTTTGGGATC[CG]G[CG]A[CG]GCTGAC[CG
][CG][CG]C[CG]CCCCCA[CG]CC[CG]GTTCCA[CG]ATGCT
GCAATACAGAAAGTTTA[CG]T[CG]GCCC[CG]ACC[CG][CG]
[CG]GGACTGCAGGGTC[CG]C[CG]GAG[CG][CG]G[CG]CAG
AGGCTTTTCCTG[CG][CG]TT[CG]GCCC[CG]GGAAAGGGG[C
G]GGAGGGCTGGCTC[CG]GGAG[CG]CA[CG]GG[CG][CG]G[
CG]GGGAGGGTACTCACTGTGAAGCA[CG]CTG[CG]CCCATGGA
TCATGTCTGTG[CG]TTACACCAGAGGCTC[CG]GGCTCCACTAA
TTCCATTTAGAGA[CG]GGAAGACTTCCAGTGG[CG]GG
SEQ ID NO: 5398
CAGCAGCCTGCTGAGGAGTGGGGA[[CG]]AAGAGCAGCCTAAAC
TTAGGGCT[CG]GGATATTT[CG]ATGCCACCCAAATTGC[CG]T
CCTACCCCAA[CG]AGGCAGGGAAAGGAG[CG]GAG[CG][CG][
CG][CG][CG]AGCTGAGTGAGTGCTTA[CG]T[CG]CAG[CG]A
GATCTGTGCTGGGATAATTAGAGAGGAGTTGGGCTGAGC[CG]AG
TCCTCTTTCAGCAGCAGCAGC[CG]GAGC[CG]C[CG]C[CG]CA
GCC[CG]GTGGGGCAACCCTGACT[CG]GAC[CG]CT[CG]GGAG
AGCCCCAGGAGAGGCCAG[CG]C[CG][CG]CAGCAGC[CG]CCC
[CG]CTG[CG]CCCACCTCCC[CG]GCTGCTCC[CG]GAGGGCTC
ACAAAGG[CG]GTGGC[CG]CC[CG]AGTGGCCTTCTCCATCCAG
G[CG]TT[CG][CG]TCCTCCTCCCCACCTTCTCTCC[CG]AAGG
[CG]AAAATGGCAGGGCCAGG[CG]AGAACCTGGGACAG[[CG]]
GTGGCCCTAGCCCTG[[CG]]ATCCTCACCCCTCCTGCTAGGAGA
GGCTG[CG]GGCTGCC[CG][CG]GA[CG]ATGTGGC[CG][CG]
GCTGCTCC[CG]AG[CG]CATCTT[CG]GCC[CG]GGTCCC[CG]
C[CG]CCACCCCTCTTCTCTGCTCCTTCCATCC[CG]CCCA
SEQ ID NO: 5399
GGGTGCAGAAG[CG]AGACT[CG]AGAGTCCAC[CG]GCCAGGGG
[CG]TCTGTCCA[CG]GGTCTGCA[CG]GGAG[CG]CAC[CG]C[
CG]CT[CG]GCC[CG]GGGG[CG]TC[CG]TGG[CG]CTGGGAG[
CG]AGAGCTT[CG]G[CG]G[CG]GCTG[CG]GGCAGGG[CG][C
G][CG]GAG[CG]GGCTGCAGGTG[CG]GG[CG]GAGGC[CG]G[
CG]GGGGG[CG]C[CG]GGGG[CG]CTG[CG][CG]GCCCTTGG[
CG]G[CG]GGGG[CG][CG][CG]GGGTGG[CG]GGGGAGGC[CG
]AGG[CG]C[CG]GCAGCTT[CG][CG]C[CG]G[CG]GCTGGAA
G[CG]GG[CG]GGCTGCA[CG]GG[CG]GCT[CG]AGTG[CG]GG
GACCCCAGCCCCT[CG]CCCT[CG]TGAG[CG]C[CG]CCCCTGC
CACCTGCTGCCAAGTCAC[CG]GACTGGGGATG[CG]GGGGG[CG
]GGGTG[CG]GGGAGAGGAAAG[CG]C[CG][CG]GGTGGCA[CG
]GTGCCTCTGG[CG]ACAGAGTAGATGGACC[CG]AAAGAGACC[
[CG]]AGGTGACTT[CG]GGCTGGGCAGGACACCCC[CG]GGAGT
TGCCAG[[CG]]GCTCTCAG[CG]GG[CG]CCTCTAGGACCCCTT
GTCACTG[CG]AGCAG[CG]CCTGCTCTGGGGAGGGGCT[CG]AA
GG[CG]C[CG][CG]CCTTCTCAA[CG][CG]C[CG]CTG[[CG]
]TC
SEQ ID NO: 5400
ATCATTGTTGTTGGTTCCAGGAGGAG[CG]AAG[CG]CCTGGAGA
T[CG]GG[CG][CG][CG]GG[CG][CG]GCTCTGGGAG[CG]GG
GGAAGGTGAGGGGAAATGGGACATGATGGCATTAATAAT[CG]TT
ACCAAAGA[CG]GTGGGAGTAACAAAGGAATG[CG]TCTC[CG]A
GA[CG]C[CG]CCCAGCCC[CG]GGGTGTTTTCTGG[CG][CG]G
T[CG][CG]GTGCAGGAA[CG][CG]AGCCC[CG]C[CG]C[CG]
AGCCTCC[CG][CG]CCTG[CG]TT[CG]TTGG[CG][CG]G[CG
]CC[CG]G[CG]GTAGTGCCACCC[CG]AGGC[CG]AG[CG]CTG
CCCC[CG]C[CG]GCC[CG][CG]GCTGCCAGC[CG]GCCCTGCC
[CG][CG]CC[CG]GGCCC[[CG]][[CG]]AG[CG]GC[[CG]]
CACTTCACCTTA[CG]GAGGGGAGATAATGAGATCAATTAGAGG[
CG]C[CG]TCAC[CG][CG]C[CG]GAGACAGCTGC[CG]C[CG]
CATAGTAATCACC[CG][CG]GGCTGGGTG[CG][CG]GGGGCTC
CC[CG]CTACCTG[CG][CG]CCTGCTGCTCCCACCA[CG][CG]
GCAC[CG]ACC[CG]GG[CG][CG]CCCC[CG]GCCCCTGTC[CG
]CAGCCCACAGCCACAC[CG][CG]CACCCTACACCCTCCTTG[C
G]CCTCTGCTGGGGAGCTCACCCCCTCCACT[CG]CACAGTG[CG
]CTG[CG]GCC[CG]GGGTGTGGGAGGTCC[CG]GGACTTGGGGT
GTGAGTGCCTGTGTGGGGGTAGGGGCAGGT
SEQ ID NO: 5401
TCCTCCTTCAAAACCAAACCAAACCACCACCAACAAAAACTTCTG
TGCTACTCTGGCTTCTCTGGTTTTGTTTGGGAACAGTGGAACCAA
GTTAGCC[CG]GGCCAGGG[CG]CAGATGATGGACTCAGAG[CG]
CCCAGGGACCCTAGAGAGAGGAGCACTCCTCAAGAGCCCCCTGGC
CATCACC[CG]AG[CG]CCCTGGAG[CG]CCATCACC[CG]AA[C
G][CG][CG]CTCCAGGCCCT[CG]AACAAGGCCTCTGGCTGCCA
GAG[CG]AGTGAGGGG[CG]CAGAGG[CG]GCAGAGAG[CG]GAG
AGCCC[CG]GTGTCTC[[CG]][CG]AGGG[CG]G[CG]G[CG]G
CCAGCAGA[CG]G[CG]AT[CG]AGG[CG][CG][CG]CCA[CG]
GCA[CG]GCCAG[CG]CAGACA[CG]C[CG][CG]GGGTCT[CG]
GGC[CG]GAGC[CG]TGCAGC[CG]GGCC[CG]CTGCCTCTTTGC
CCCTCATGGCTC[CG][CG][CG]GGAGGAAAC[CG]GGCCTTCT
C[CG]CC[CG]CCCTCCTCT[CG]CTG[CG]GTGTCCCCAGCACC
CC[CG]CCC[CG]CCCC[CG][CG][CG]GTCCCCAC[CG]T[CG
][CG]CTCCCCTCCCTCCT[CG]CCCT[CG]CTC[CG][CG]CCT
CCTGTTGGCAGAGATGGCCT[CG]AAGGCCTCTTCCAATTTGAAT
SEQ ID NO: 5402
ACACACATGCACACATTTTCT[CG][CG]CTCTCTC[CG]GCTCT
CCTTTGTTTATTTTCTAATCTATATTTTTACTGGAAGATTTCCTC
TTTATTCTCTCC[CG]CCCTCCTACAAG[CG]CTCTTGCTGGC[C
G]TCTGGGTGCACACAC[CG]CTCCCT[CG]ATCACCCCAGCCCC
CTTCCTGGTCTCC[CG]AG[CG][CG]GGGTTTGAAGGTCACCTC
CTTTCCAGTCCC[CG]TG[CG]AGC[CG][CG]CTGC[CG]C[CG
]CCTCCTCCAGCCAGAGT[CG]GTGGGACTGGCTG[CG]CTGCCC
TGAAGTGGTTCTCCAAGCAG[[CG]][[CG]]GAGGGTGG[[CG]
]GA[CG]G[CG]GA[CG]GAGCCCAGGGGC[CG][CG]T[CG]GG
TGGGGAAACC[CG]AACT[CG][CG]GAGGGGAATCCCTCCCCCT
C[CG]CCCCAGCCCCCCAGCAGCACC[CG][CG]GTGGGG[CG]G
GGG[CG]CTCTGCCAGCCC[CG]GGAACAGCAGAGG[CG]G[CG]
GCACTGGCTGGACCCA[CG][CG][CG][CG]CCTC[CG]GGGCT
GAAGAAGGAAGGAGTGAGC[CG]AGC[CG]AGCACCCCACATCTG
GAGGGGACAGCCAGC[CG]TGGGCCC[CG]CCC[CG]G[[CG]]T
C[CG]GAGCAGGAGAACTC[CG]AGCTTCTTGCCCAG
SEQ ID NO: 5403
GTGCC[CG]GGAAC[CG]CT[CG]C[CG]AAGGAGGAAG[CG]C[
CG]TC[CG]TCTGTCCTTCCC[CG]G[CG]G[CG]G[CG]G[CG]
AG[CG]GAG[CG]CAGGAGCCC[CG]CACTCCACACACTCATGCA
CACACACACTCACACACACTCACACACTCTCCCACAACACAATAC
CCTGACACACACTCACA[CG]CA[CG]C[CG]CACTCACAC[CG]
GGTGCCTGGGAAAAT[CG]CAGA[CG]C[CG]GGGAGGAGCAGGG
GG[CG]GTGATGGGAAGGGGAGCTG[CG]AGG[CG]AAGTGTTCT
TCAGGGAAG[CG]GGCT[CG]AGTCTC[CG]CAGCTG[CG]G[CG
]G[CG]G[CG]G[CG]G[CG][CG]CTGGGC[CG]G[CG]G[CG]
GG[CG][CG]GGCAGGGGGC[CG]GGGGTGC[CG][CG][CG]GT
AGGAGCCTGGCTTGGACAGC[[CG]]AGGAGCAGGAAGTGGCCTC
TGACCCAGGACAC[[CG]]AGCAGGGCTCTCTTGCCTGGATT[CG
]CCTTTACAAAGTAACT[CG][CG]AAGGTCCC[[CG]]GAGGGG
[CG]TCAAG[CG]G[CG]ACAG[CG]GCC[CG]CC[CG]CC[CG]
CAGTC[CG]AAGCCCCCAGCCCTGCTGTCTTGCCTTCCCCCATTC
CATCAGTTGCCATTGCAA[CG]CCAATCCTGTTACA[CG]ATACA
GACT
SEQ ID NO: 5404
CCCTG[[CG]]CAA[CG]CCTCCT[CG]TCCTC[CG]AGATTTTC
CAATGGTGG[CG]CAAGCTCCTCCCT[CG]CC[CG]AGCTGGG[C
G]C[CG]TCCTAGAGCCAAG[CG]CC[CG]CTAGAGC[CG]AGAC
TAGGGGG[CG]GTGAGGAGTGGGACC[CG]CT[CG][CG]GCCAT
TGGTTGTG[CG]GCCAGGAGGGG[CG]GAGGGA[CG]A[CG][CG
][CG]GGCTGTG[CG]GGGC[CG]GCAGCC[CG]GATCCACTCC[
CG]CTG[CG]CCTGCTGTC[CG]C[CG]TG[CG]CCCAGACTG[C
G][CG]C[CG][CG]C[CG]CTG[CG]CCCAACATTCC[CG]AGG
A[CG]GCTT[CG][CG]GG[CG][CG]TAT[CG]TCCAGAC[CG]
GAGCAC[CG]CCCCAC[CG]CTAG[CG]CAGGAGACCTGC[CG]G
GGAAGT[CG][[CG]]TGTCCTGACCTGCAGGTCAGTGAGGGAAA
CTTGCAGGGTCC[CG]AGCTCTGGGGGTGAACTTGCCCTA[CG][
CG]GAGAG[CG]CCCCACTCCTTGCCTGGGG[CG]GCCT[CG]GG
TCCTGGAGG[[CG]]AGC[CG]CCTCCCAGACTCTCCCC[CG]AG
ATCTGGGCTCC[CG]GAGATGTGGCTCCTTTCTGAGAAACACCCC
CAAATCTATCCCTTTTGAGGTGTCCTTACTGTCC[CG]AGAAGCA
AT[CG]CAGC
SEQ ID NO: 5405
C[[CG]]GCACAGCAATTAACATTGGTCCAAA[CG]GTGTCAGTG
AACTTTAGCTGCAAAGAAACTACCTCATTTAAAATTTAAGCAGAC
CACAGGGAGTAGCATTGGAGGAAAGAGAGGAGATTTTCTCCTTCA
ACATTTTGAGCATACTGGAATGCCAACCCCCTAGGTAGGTGCCAG
GGCCACCACAGGAACCTGACT[CG]CAGGAGT[[CG]]TCCTC[C
G]TCTCTA[CG][CG]AAG[CG]CCCCCT[CG]AGGTGGGCAGGG
GGTGG[CG]G[CG]G[CG]A[CG]GTGG[CG]GAGC[CG]CAGAG
[CG]AGCTAGAGAG[CG]AGAG[[CG]]GTGAGACTCTG[CG]GA
[CG]TCTTCC[CG]CC[CG]C[CG][CG]CTC[CG]CCCCACCCA
GCCTC[CG]CAGCCT[CG]GGC[CG]GAT[CG]CC[CG]G[CG]G
GGAAGATG[CG]CCTCAAGAACCAGGTAGAAG[CG]CCT[CG]G[
CG]CAGGCCC[CG]CACCCC[CG]ACTCTGCC[CG]CCCTCTGTT
A[CG]GACACC[CG]CTGGGCCA[CG]TGGT[CG][CG]ACTGGC
TTCTCCCAG[CG]GCCAGCCTGGCCACCC[CG]ACTCCCAGGGAG
GGGGAGAGGGCCCTTGCAAGAGGATCCTGCCCC[CG][CG]CTGC
CCAGACCTGAGGGCTCCTGG[CG]ACC
SEQ ID NO: 5406
CTTCATGCCTCAGAAA[CG]TGGCCTACTCTGCATT[CG]GTGTG
TG[CG]GAAGCAGCAATCACAGAGGCAGCCCTAATAC[CG]GAGG
[CG]G[CG]G[CG]GCAGCAGCAGGGCCAGGTGGTAGCT[CG]GG
GCTGAGGAT[CG][CG]G[CG]GGGGCAGC[CG]CTATGGGGCCC
AAGCCCTGACACA[CG]TACCATT[CG]CTCAAGT[CG]G[CG]G
TA[CG][CG]C[CG]CCAC[CG][CG]C[CG]AGGAGGCCACCTG
GGACTTGTGGC[CG]CAGTC[CG]A[CG]AGGG[CG]ACA[CG]A
GGGCAGA[CG]GTGTAGC[CG]AAT[CG]TAGCCAGAGCTGGG[[
CG]]G[CG]G[CG]AG[CG]CC[CG]TGCACCTTCATGTGCTTA[
CG]CAG[CG]AGCTGGGGTG[CG]TGTAGCACTTGT[CG]CAGCC
C[[CG]]CACCTTGCA[CG]TGTATGGCTTGT[CG]CTAGTGTGC
A[CG]TG[CG]AATGCTTCTTA[CG]GT[CG]CTGCTGTTGG[CG
]AAG[CG]C[CG]CT[CG]CAGCCCT[CG]AACT[CG]CATCTGA
AGGGCTTCT[CG]CCTGG[CG]GAGGCAA[CG]CAGAGACATTAG
TGCTTGTGGGT[CG]TGTTCC[CG]TCAGGTGCTTGCCACCCTCC
CCCATT[CG]TCTCTCATTTTCTGGAAAAGAACTACAAAATATT
SEQ ID NO: 5407
ACAAGTGAAATAATGAGGAAG[[CG]]TGCAGAGTGAATGCCAAG
AGAAAAGGCACAAAAACCCTATTGAGAGGCCC[CG]GC[CG]CTC
CTGG[CG]TAGTCCATCACATGGCAATAGTCCTATTTAAGC[[CG
]][[CG]]C[CG]C[CG]G[CG]CCTTTCAGCACCACTAG[CG]C
TGGCCAGCACCC[CG][[CG]]CTCTTTGGG[CG]GTGCCCA[CG
]GCAGCAGAGGCTACTGTTTCAGCCTAGGTCTCAGC[CG][CG][
CG]TTCAGCCTCCTGGGCAGAGGCAGCTG[CG]GGATAC[CG][C
G]GCCAGGGAAAG[CG][[CG]]TGGAGAGC[CG]AAAGGTG[CG
]GTGGG[CG]CAGAGGG[CG]GGCTGGCTG[CG]GGG[CG]AC[[
CG]][CG][CG]C[CG]GGGCCATGC[CG][CG]CTCCTTCCTGG
TGGACT[CG]CTAGTGCTG[CG][CG]AGG[CG]GG[CG]AGAAG
AAGG[CG]CC[CG]AGGGCAGCC[CG]C[CG]C[CG]CTCTTCCC
CTA[CG]CTGTGCCCC[CG]C[CG]CA[CG][CG]CTGCA[CG]G
TCTCT[CG]CCTGG[CG]CCTGCCA[CG][CG][CG]CAAGGCTG
GGCTGCTGTG[CG]TGTGCC[CG]CTCTG[CG]TCAC[CG]CCT[
CG]CAGCTGCATGGGCCCCC[CG]GGC[CG]CC[CG][CG]CTGC
CTCTACTCAAGGCTTCCTTCCCACCCTT[CG]GCT[CG]CAGTAC
TGCCA[CG][CG]CCCCTGGGC[CG]CCAGCACTCTGCTGTGT[C
G]CC[CG]GGGT[CG]CTCAC
SEQ ID NO: 5408
GGACCAATCAC[[CG]]GCTCTGAGAAAGTT[CG]GCAGTGGCCA
CCACATCTGGTTCT[CG]TTAACTTTTCTAAGGCAG[CG]GC[[C
G]]CTGGAGCAG[[CG]]GGGCTGG[CG]GGGTAAAAGCTCCTGG
CCAGGGCTGCCTGGAGCTGCCCCTTCCACTC[[CG]]CCCCCAGG
GAGCTCC[CG]GGTCATCCTCTCATC[CG]GGCTGCCC[CG][CG
]GCCCCCAAGGAGCCCCACCCC[CG]GGACCAAATGGCC[CG]CA
AGGTTTGGGGCAG[CG]G[CG]TTGCAGGAGATGAGCTCAG[CG]
CAAAGGGAACCC[CG]CAG[CG]G[CG]AGTG[[CG]]GCTGCTG
GCCTG[CG][CG]CTGTGGCCCCAACAGGCTGGCAGGG[CG][CG
]GG[CG]GGTGG[CG]GGGTTG[CG]GTATGAGCTTTGCTCCCTG
CCCTGGGGTCC[CG]GG[CG]CTCCTGGCTCTGGAGGCCTGGCCA
T[CG]GTC[CG]AAAAGCAAAGGGACATTGT[CG]TGGTCCCCT[
CG]GC[CG]CTT[CG]CTCCACCCAGAGA[CG]CCCTGAGGAGAA
G[CG]AGCCTTTGTA[CG]AAGGCAGAGGGCTGACTCCTAAGTTC
TGTCCCCCTCC[CG]AAGGC[[CG]]GC[CG]CTAGGGAAGACTT
GGCCACCCTCTGGAAGTACCT
SEQ ID NO: 5409
GG[CG]CTGGTGCTGCTGG[[CG]]GTG[CG][CG]ACC[CG][C
G]CCTGCACA[CG]CCCATGTACTACTTCCTCTGCCACCTGGCCT
TGGTAGA[CG][CG]GGCTTCACTACTAG[CG]TGGTGC[CG]C[
CG]CTGCTGGCCAACCTG[CG][CG]GACCAG[CG]CTCTGGCTG
C[CG][CG]CAGCCACTGCA[CG]GCCCAGCTGTG[CG]CAT[CG
]CTGGCTCTGGGTTC[CG]C[CG]AATG[CG]TCCTCCTGG[CG]
GTGATGGCTCTGGAC[CG][CG][CG]GC[CG]CAGTGTGC[CG]
CC[CG]CTG[CG]CTATG[CG]GGGCT[CG]TCTCCC[CG][CG]
CCTATGT[CG]CA[CG]CTGGCCAG[CG]CCTCCTGGCTAAG[CG
]GCCTCACCAACT[CG]GTTG[CG]CAAAC[CG][CG]CTCCTGG
CTGAG[CG]GC[CG]CTGTG[CG][[CG]]CCC[CG]CCTGCTGG
ACCACTTCATCTGTGAGCTGC[CG]G[CG]TTGCTCAAGCTGGCC
TG[CG]GAGG[CG]A[CG]GAGACACTAC[CG]AGAACCAGATGT
T[[CG]][[CG]]CC[CG][CG]TGGTCATCCTGCTGCTGC[[CG
]]TTTGC[CG]TCATCCTGGCCTCCTA[CG]GTGC[CG]TGGCC[
CG]AGCTGTCTGTTGCATG[CG]GTTCAG[CG]GAGGC[[CG]]G
AGGAGGG[CG]GTGGGCA[CG]TGTGG
SEQ ID NO: 5410
CTCCAGCCTTTCTCTCTGGGCCTAG[CG]GGACTCTCCCAGGCAG
GCCCCTCCCTGCC[CG][CG]GG[CG]CACTTTCCC[CG]CCTGC
ATCTGAGG[CG]TGG[CG]CAGCTGGGAGCAAAGCACAGGTGGGC
TGGG[CG][CG]GTTTGGGGTT[CG]GG[[CG]]TGGCAGAGTGG
[CG]G[CG]GGGTCTGGGGAAGAGTTGTCTTGGGGGCAG[CG]CC
AGCCACCAGAGCC[CG]AGTCAG[CG][CG]GCCAGGACTCTGCA
GGGGCAGGTAG[CG]ACCCTTAGAGA[CG]CAA[CG]TGG[CG]C
AG[CG]GACT[CG]GCTG[CG]TGGGGCAAGGGC[CG]GGGC[CG
]GACACAGGAGCAG[CG]GGGATGC[CG]GGTG[CG]CTC[CG]A
GGGTGTGGCCCC[CG]GGCTGTG[CG]GGGCTCAGAGCTGCTTGC
TGGG[CG][[CG]]GTGCC[CG]ACAAAGGTAAGGCAGGAGTGGG
[CG]TCTTTCT[CG][CG]GGA[CG]CTGGGT[CG]GAGGGAGCT
TGAACTTGAGGTTGTTGGGGAGAGCCAGAAAGGA[CG]CCAGTGC
CACAAGGAG[CG]CCTGCCTTGGGG[CG]TGGAGC[CG]CTCCTC
CCCTCACTGGGCAGACC[CG]GCCAGCAACCAGGTAGGAGAGTGG
GGGCAAATGTGGCCATTCT
SEQ ID NO: 5411
CTGTTGACTTATGCAACTGGGGAGAGGGTTTTTTTAAC[CG]CTT
TGAGATATTGGTCCATCCCTTTTCTCTCAGAA[CG]TCCTCAAGG
GCA[CG]TAAGAGTTGGAGGTGACCTC[CG]GGAG[CG]CCTAAT
TTTGAGC[CG][CG]GAACTT[CG]GCCCACTTCTC[CG]AGGGG
ACCAGG[CG][CG][CG]CCAATA[CG]CATGTG[CG]GGCTCTG
AG[CG]CTCAGAG[CG][CG]CCTCTTCCTTCC[CG]GCTCCC[C
G][CG]GTG[CG]CACC[CG]CTGGCCACTCTG[CG]CA[CG][C
G][CG]C[CG]GGTGCCC[CG]GCCTAAGGC[CG]TTGACCT[[C
G]]GGTTCTCCC[CG]GCACAGT[CG]AATCCA[CG]CCAGGGCC
CTCAGGC[CG]GTAGCTGTCCTGCAGTC[CG]AG[CG]GAGCTG[
CG]ACCT[CG]GGCAGCTGGAAGCCTGTGGGCTGCTGCTTCTCCA
GGCAGG[CG]G[CG]GAGGGATGCAGGCAGGATGAG[CG]G[CG]
GTCCCTT[CG]C[CG]CCACC[CG]GAGAAC[CG][CG]GCTGGT
GCCCTTGAAGGCCCTGGGATGCCTGGGTTGGGTGGGTGAGTGAA[
CG]AGAACCCTGAGTGAGTGAGGGGAGGG[CG]GGTCCCCTCCTG
GCTTCAAATTCAACCCAATCAGCTC
SEQ ID NO: 5412
AAGGGGGAAGGAGGGTAGGGTAGAAGGAGGG[CG]GGGGAGAGAC
CCAT[CG]CCTCATCTTACATTTCCCCTCCCAAGCTCATTTAGTG
GGAACCTCTGCTGGGCTCCTG[[CG]][[CG]]CCTCCCTCCCCA
CCCCCTCAACTCTGGG[CG]ACCATCTCCCCCTCTTCCCTTGCTC
ACCCCCCACCCTTCCTGCTCTTC[CG]TCCCTCCCTAC[CG][CG
]TGCCTCCTCCCCTCCCCCT[CG]CCTCCCTCCCCTCCAG[CG]G
CAGTAGCTGTAGCAGCTTCAG[CG]AAGC[CG]GAGATGGGCAGA
GAG[CG][CG][CG][CG]G[[CG]]CAGCAGCTCCAGATTCACT
GCTCTCCCCTGCAGCTCCC[CG][CG]CCCC[CG]C[CG]CTGT[
CG]CTGCCT[CG]GTGTCCCCCAGCCCCAGT[CG][CG]CTCTTA
GGACAG[CG]C[CG]CCAC[CG]C[CG]CCTGGCCCTGCCTGCCT
CCTG[CG]C[CG][CG]CAGCCCT[CG][CG]AG[CG]CCC[CG]
GATGG[CG]CTTTACCCCTAGGAC[CG]GTGAGTAGG[CG]GGAG
AGTGCAGGGGGT[CG]GG[CG]TCAAAGCTTGG[CG][[CG]]GA
GAGAACATCTTTTGGTTTGGGAGGCACCCCAAACCAGCTGCTGTG
ATTCCC[CG]TCCTCCAGGCA
SEQ ID NO: 5413
T[CG]GGGGAAGCTCAGACTCCTAAACT[CG]CACTCTC[CG]TG
CTTTG[CG]C[CG]GGACCCCTGGCCACCCC[CG]G[CG]CCTAC
TATCC[CG]CCCTCCCTCCC[CG][CG][CG]CCC[CG]C[CG]C
T[CG]C[CG]GGACAGCCC[CG][CG]GGCCATGGAGCTGG[CG]
GT[CG]GGAACCTCAG[CG]AGGGCAA[CG][CG]AGCTGGC[CG
]GAGCCCCC[CG]CCC[CG]GAGCC[CG]GGC[CG]CTGTT[CG]
GCAT[CG]G[CG]TGGAGAACTT[CG]TCA[CG]CTGGTGGTGTT
[CG]GCCTGATCTT[CG][CG]CTGGGTGTGCTGGGCAACAGCCT
AGTGATCAC[CG]TGCTGG[CG][CG]CAGCAAGC[CG]GGCAAG
C[CG][CG]GAGCACCACCAACCTGTTCATCCTCAACCTGAGCAT
[CG]C[CG]ACCTGGCCTACCTGCTCTTCTGCATCCCCTTCCAGG
CCAC[CG]TGTA[CG][CG]CTGCCCACCTGGGTGCTGGG[CG]C
CTTCATCTGCAAGTTCATCCACTACTTCTTCAC[CG]TGTCCATG
CTGGTGAGCATCTTCACCCTGGC[CG][CG]ATGTC[CG]TGGAC
[CG]CTA[CG]TGGCCAT[CG]TGCACT[CG][CG]G[CG]CTCC
TCCTCCCTCAGGGTGTCC[CG]CAA[CG][CG]CTGCTGGG[CG]
TG
SEQ ID NO: 5414
CTC[CG][CG]CCCCCTCCC[CG]CCCCT[CG][CG]GCTCCCCC
ACCCT[CG][CG]TT[CG]GCAG[CG]CCAGGCTG[CG]CTCTCC
C[CG]GTGCACACC[CG]GC[CG][CG]C[CG]AGAACTAAATC[
CG][CG]GGCTGAAATTA[CG]TTTTAAAAATTAACATGTTGAAG
[[CG]]TGTGCCATTTAGTGAGAGGTGTTTTGGGCAAAGAATCAA
TTTAACTGTGACTGAC[CG]A[CG]GGCTTGACTGTATTAATTCT
GCTAC[[CG]]AAAAAAAAAAAAAAAAAAAAGCAATGAGC[CG]C
AAGCCTTGGACT[CG]CAGAGCTGC[CG]GTGCC[CG]TC[[CG]
]AGAGCCCCACCAG[CG][CG]GCTCA[CG]CCTCAGTCT[CG]C
[CG]CCCCAAGGTGGGATC[CG]A[CG]CCCAAAGGAGGG[CG]C
CCCAAGGTGGGATC[CG]AG[CG]GGC[CG]CCCTAGGAGGAGTG
AACCC[CG]CC[CG]GG[CG]CACAGCTC[CG]TG[CG]CCTGTC
CTCCCTCCTCCAG[CG]AAATCACACC[CG]CTTTGCCTCCTCTT
GCAGCAC[CG][CG][CG]TGCCTAGGTTCT[CG]GTCTG[CG]C
AGCTGGGAGTCTCCCCCACCAG[CG]C[CG][CG]GAGC[CG]CC
[CG]CTTC[CG]CTCCCTCTTTC[CG][CG]GGTTTGAGCCTCC[
CG]T
SEQ ID NO: 5415
ATACCAGGTGTTG[CG]TAATCTCTACTTGGAGATTAGCCACCC[
CG]TG[CG]CCCAGGTGAAAGATATCATTCTTC[CG]TG[CG]AT
C[CG]AAGTGC[CG]TGGAAGTTAGTGCCCTAGCCCAGTCCAGGA
GGAAGGGG[CG]T[CG]TGC[CG]G[CG]GTTTTAAGCT[CG]GA
AGGGGCAGGGGAATGAGCCCAGGGACCCCAG[CG]GGG[CG]CAG
GTAGGAGGCTGTG[[CG]]CT[CG]C[CG]GGTG[CG]CTC[CG]
GCCC[CG]ATTCCCAG[CG]CAGCCAGTAAGTGG[CG]CTGGGCC
T[CG]GGTTTGG[CG]GCC[CG]GAGGAG[CG]GGCTG[[CG]]G
ATTACCTGCAGCAG[CG]GGGAGC[[CG]]C[CG]AGCTCCTCCC
[CG]CC[CG]CCCCCACACCCCACCCCCAC[CG]CTGCACTAACC
C[CG]GCTCAGCTGGCTC[CG][CG]CACTTGCT[CG]GAGGAGC
[CG]GGGC[CG]AG[CG]GAC[CG]C[CG]GCTGCAGGCAG[CG]
AG[CG][CG]GCTGGGCTG[CG]GGGCTGCTTCCC[CG][CG]TC
CTC[CG]GGCC[CG]GGC[CG]CCCTCCTCC[CG]CACAGTG[CG
]GAGCAGGGAGGCCC[CG][CG]CCT
SEQ ID NO: 5416
CAGGTGCTCAGGCAGAAGTCAGC[CG]ACTCTGGGTT[CG]AGTC
CCAGCCCCACTGCTGGTCAGCTCCTTCTTATACCTCAGTTTTCCA
GCTGTAAAATGGGACTAAGGCCATTCTTGTAGGCCAATGGTGAGG
ATGGGAAATA[CG]CA[CG]TCATTACC[CG]ATGGGA[CG]GTG
CCAGCTCCCCT[[CG]]TCCAC[CG]A[CG]TGGGCC[CG]AGCT
AGGGTTCTGAGC[CG]GATC[CG]GGGGGAAC[CG][CG][CG]T
CTAGGGCTGGAAACC[CG]C[CG]CCACAG[CG]GGCTAGAGGT[
CG]TCCC[CG]CC[CG]CAACATATG[CG][[CG]]AAGGAAAGT
GCTA[CG]AA[CG]TCAAATGGC[CG]CCCCC[CG]C[CG]A[CG
]CCATCTGCTCTG[CG]AAGCAGAAA[CG]G[CG]GCAGCTG[CG
][CG]CCCAGTCCCTC[CG]CC[CG][CG]CCC[CG][CG][CG]
C[CG]AGTC[CG]GATC[CG]C[CG]CC[CG]G[CG]GCAC[CG]
[CG]GACAG[CG]CCAGCCC[CG]GGGTGG[CG]GG[CG][CG]G
GGCTGGGGG[CG]CTGGGAAGAGGGGTC[[CG]]CTGTAAGGCCC
TCC[CG]C[CG]CCT[CG]GGGCCAGTCTGGGTCTAGCCACTTCA
CCTGTGTGCTTGAAATGTCAGTTCTTTACCAGCCAGGCTGC[CG]
TTTG
SEQ ID NO: 5417
AG[CG]CTTTCTCTTTTCCCCCAGAAAGTCTCCAGGCAGCAGCTC
TGTGAGATCCTTAAGCAAGGTAAGGAAACTCACC[CG]CTG[CG]
CTG[CG]GCTT[CG]TGGCCAGCAGGGCTGGGACATACT[CG]CC
TCA[CG]CTTCAGCAC[CG]GGGACAGCTCCTGCCT[CG]CCAAC
TT[CG]GCAGCTCTTCT[CG]ATGTCT[CG]C[CG][CG]GGCTG
TGCCTCACAGGCTA[CG]GGAGGGGAGAGTGTCTCCCCA[CG]C[
CG]GGGTCC[CG]GCCTCTGGGTTTTAGGGAG[CG][CG]AATGG
GTCTC[CG]ACAGCAA[CG]GGAGCAGC[[CG]]GTGG[CG]CCT
CAGGCTG[CG]GTGGCAA[CG]AGCC[CG]ACTGCACTA[CG]GC
TTTG[CG]GGAC[CG][CG]CCAG[CG][CG]GAGGAGAC[CG]A
GCCCATCTCAG[CG]GGC[CG]GGC[CG]GACCCAGGTGAG[CG]
GCCCTGGCTCCC[CG]AGGAATCCA[CG]GCCCT[CG]CCTGC[C
G]AAGGCTTACTCCCTCCTGGTGC[CG]GGG[CG]CCCCCAGCTG
TCTGCTC[CG]CCTCTGACCCTG[CG]GGCTGCAG[CG]AAGGCT
G[CG][CG]CCCACC[CG][CG]GGGGAC[CG]GAA[CG]GAGGG
TAATG[CG]GG[CG]GTGTC[CG][CG]CC[CG]CCTAACAGT
SEQ ID NO: 5418
TC[CG]TTTTAAGTAAGAAGAAAATA[CG]TAATTA[CG]AAGGA
GGCTTTACCTTTGGGAAAACAAAAAGCCACTTTTGACCAATTATT
CCCACAGATACACACC[CG]GGTCCCCAACCACC[CG]CCAGGAG
GGCCCATCCTGGTGCCTGGAAGG[CG]GGGGTTCCTG[CG]ATCT
GGGGTTGGGATTT[CG]GCTCAGGC[CG]TG[CG][CG]GTGGCC
TTGGGT[CG][CG]CC[CG]CCCTGCCTGGGCCCCCAGCCCAAGG
GAC[CG]AG[CG]GGTG[CG]GG[CG]GGG[CG]GG[CG]GGG[C
G]GG[CG]GGG[CG]GGGGTGT[CG]GGGGCT[[CG]]GACT[CG
]GAGC[CG]TCCCTGCCAGTGGCTTT[CG]TGGG[CG]GCCC[CG
]CCTTGGAGCCCAGGCCAA[CG]AGC[CG][CG][CG]GGA[CG]
GAAGAGCTG[CG]GGTGGGGAGGGACAAG[CG]GG[CG]GAGAAG
GGG[[CG]]GCCCTGCTGGAGGCCCAG[CG]AGTCTGAGTGATTG
ACAAGTGAATGAGCTGGGAATGAAGACTCCTGGGGC[CG]GGAGG
GAGAGAGGGGGTTGGAGGGTGGTGAATGCCTGGGCCTCTGGGGCT
CCAGGCTGCCAGTGGCC[CG]ACCAGGCTCT[CG]GTGTCCTCCT
CCAACCTCAGTTTCC

TABLE 2
The nucleotide sequences of 28 regions within a select number
of the 418 DMRs with particular relevance to CIN3 and cancer,
particularly cervical or endometrial cancer. The 28 regions are
defined by the MethyLight probes SEQ ID NOs: 5703 to 5786. The forward
(SEQ ID NOs 5703 to 5730) and reverse (SEQ ID NOs 5731 to 5758)
MethyLight primers are also provided in the present Table 2.

| | | SEQ ID | | SEQ ID | | |
|---|---|---|---|---|---|---|
| | | NO: of | Reverse | NO: of | | SEQ ID |
| | Forward Primer | forward | Primer | reverse | Probe (5′ | NO: of |
| Gene | 5′ to 3′ | primer | 5′ to 3′ | primer | 6-FAM-3′ BHQ-1) | probe |
| DPP6_i | TTATCGTAGTGTTTG | 5703 | CCCACTCCGCGCT | 5731 | CGTGCGTCGCGCGCGTA | 5759 |
| | TTTGTGGAAGTC | | AAACTAA | | | |
| NTM_ii | CGAATTTCGGTAGTC | 5704 | CCGATCGCCGCGA | 5732 | TTTTTCGGGCGAGTATA | 5760 |
| | GTACGGTAT | | AT | | GGAAGTGGGTG | |
| LHX8_i | GAAGGAGGTTGCGCG | 5705 | CAAAATACGAAAC | 5733 | TTCGGGTTTAGGCGTCG | 5761 |
| | TTAGT | | AACGCGTACA | | TGACGG | |
| RALYL_ii | GCGTTTGAGAGCGGT | 5706 | CCTACTCGTCTAA | 5734 | AGCGGTAGTTCGCGGCG | 5762 |
| | AATATTAGTG | | ACTCACAACGAAA | | AGGTT | |
| FUT9_ii | CGTTGTTTTAAGAGC | 5707 | CGCAACAACTCCA | 5735 | ATCGAGGTAGCGATAGC | 5763 |
| | GCGATT | | AATTCACTACT | | GGCGGG | |
| LINC00403_iv | TCGCGGCGTGTTTGC | 5708 | CCCGATATCTCCG | 5736 | TTGGTCGTGTCGTGGCG | 5764 |
| | | | CGAAAA | | CG | |
| CLVS2_ii | TTTTGTGAGTTTTTC | 5709 | CGAACCGCTCGAA | 5737 | CGGTTGTTGCGCGGCGT | 5765 |
| | GGGAGTAGTC | | AAAACC | | TG | |
| KCNIP4_i | GAAGCGGGCGGGTTG | 5710 | GCTCACGAAAACG | 5738 | CGGGCGGTTCGAGTGCG | 5766 |
| | T | | AAAAACTAAAAT | | G | |
| NET01_i | ATCGTTTTTCGGTAG | 5711 | CAACATCGTAAAA | 5739 | ATTCGGCGACGGTTGAT | 5767 |
| | GTTTTGG | | CCGAACGTAAA | | CGCG | |
| CLEC14A_i | TCGGTTTTAGGTGGA | 5712 | CCCGAAACCGCCT | 5740 | TGTAGTTGGAAGGGCGC | 5768 |
| | TTGAAGTTTA | | CTAACTTA | | GCGATAG | |
| GSX1_iii | CGTAGAGGGCGGGTT | 5713 | GCGCAACACTAAC | 5741 | CGATCGCGCGTCGG | 5769 |
| | GGT | | GAATCCA | | | |
| ZNF536_ii | TGCGGCGGTAGTTGT | 5714 | GAACGACCGCACT | 5742 | CGCGGTGACGGCGTTTT | 5770 |
| | TTTC | | TCACCTT | | TAATTGA | |
| PDEIC_ii | GTCGTAGTGTAGTCG | 5715 | CGCGAATAAATCT | 5743 | TTATCGTAGTTTGAGGC | 5771 |
| | GGTTCGTT | | CCGACAAC | | GTTATCGGTTGTTTTC | |
| MDGA_I | GGGTGTTTGGGAAAA | 5716 | CGCCGCAACTACG | 5744 | CGAGGCGAAGTGTTTTT | 5772 |
| | TCGTAGA | | AAAACTC | | TAGGGAAGCG | |
| MHC_ii | GAGTTGGTGAGGTCG | 5717 | GCCCGCTACGCTA | 5745 | TTGGTTAGCGTGCGATA | 5773 |
| | TTTAGTTAGG | | TACGAAA | | TAGGCGCG | |
| NID2_i | TGTAGGAGATGAGTT | 5718 | CCACAACGCGCAA | 5746 | AATTTCGTAGCGGCGAG | 5774 |
| | TAGCGTAAAGG | | ACCA | | TGCGGT | |
| ZIC4 | TCGTTGCGTAAGTAT | 5719 | AACGACACGAAAA | 5747 | CGTTCGTCGTCGTTTAG | 5775 |
| | ATGAAGGTGTA | | CAAACGATATAAC | | TTTTGGTTACGATT | |
| RCN1_i | CGCGAAGGAAAGTGT | 5720 | CGCAACTACCGCC | 5748 | CGTTTTTCGTCGACGTT | 5776 |
| | TACGAA | | GTTTCTA | | ATTTGTTTTGCG | |
| RYR2_i | GCGTTGGGTTTCGGG | 5721 | CGACTCCCCGCTA | 5749 | TCGGAGGAGCGGGTTGC | 5777 |
| | TTT | | CTACAAATAA | | GG | |
| MSC_ii | GGTTTTCGTTTTTAA | 5722 | CTCCTCTACCGAC | 5750 | TTCGCGGCGTAGAGCGT | 5778 |
| | GAGGTCGTTT | | GAATTATCACTAA | | AGTTACGTT | |
| LINC00403_i | TGAGTCGTAAGTTTT | 5723 | AAAACGACGAAAC | 5751 | TTGTCGGTGTTCGTTCG | 5779 |
| | GGATTCGTAGA | | TAAAACGTAAACC | | AGAGTTTTATTAGCG | |
| RBFOX_i | CGTTGTCGTCGTTTT | 5724 | CCGCGCTACTTAA | 5752 | TCGGTGGGATTGGTTGC | 5780 |
| | TTTTAGTTAGA | | AAAACCACTT | | GTTGTTTT | |
| GALR1_i | GTGGAGAATTTCGTT | 5725 | ACGCGCCAACACG | 5753 | TGTTCGGTTTGATTTTC | 5781 |
| | ACGTTGGT | | ATAATC | | GCGTTGGG | |
| RNF291_ii | GGATTGTAGGATAGT | 5726 | GACCTAAAACCGT | 5754 | TTTTGGCGTGGATTCGA | 5782 |
| | TATCGGTTTGAG | | TAACCTCGAATT | | TTGTGTCG | |
| REG39_i | CGGATTCGGAGTCGT | 5727 | GCGACTCGTTAAC | 5755 | TAGTGGTTTTCGTGGGC | 5783 |
| | TTTTG | | CTAAACTCCAA | | GGTTTCGT | |
| RP4_ii | GCGTTTAGTAAGTAG | 5728 | AAACAAAAACCGA | 5756 | TTTTCGGAGCGTATTCG | 5784 |
| | TTTTGAGTTTCGTA | | AACCGAACA | | GTATTTTCGTTGTTT | |
| ELAVL4_i | CGGAGTCGTAGAGCG | 5729 | GAAACGCGACGAA | 5757 | CGAGAGCGGTGAGATTT | 5785 |
| | AGTTAGAG | | CGAAAA | | TGCGGA | |
| SERTM1_ii | TTGTAGGTTAGGATA | 5730 | CGAACGCGTATCG | 5758 | CGGTAGGTTTTTTGCGT | 5786 |
| | CGCGATTTTT | | TCCAAA | | TAGCGGTGG | |

TABLE 12

| | | | | | | | Amp- | |
|---|---|---|---|---|---|---|---|---|
| | | | | | | | licon | |
| | gene_ | Chro- | Rxn. | Rxn. | Amplicon. | Amplicon. | SEQ ID | |
| rxn_name | name | mosome | Start | Finish | Location | Length | NO | amplicon_sequence_5_to_3 |
| DPP6_i | DPP6 | 7 | 153584008 | 153584079 | chr7: | 72 | 5787 | TCAC[[CG]]TAGTGCTTGTTTGTGG |
| | | | | | 153584008- | | | AAGC[CG]AG[CG]TG[[CG]]TG |
| | | | | | 153584079 | | | [[CG]][[CG]][[CG]][[CG]][[CG]] |
| | | | | | | | | CACCCAGTCCAG[[CG]][[CG]]GA |
| | | | | | | | | GTGGG |
| NTM_ii | NTM | 11 | 131781252 | 131781354 | chr11: | 103 | 5788 | C[[CG]]GT[[CG]]C[[CG]][[CG]]GG |
| | | | | | 131781252- | | | TTCAC[CG]CTCAGTCCC[CG] |
| | | | | | 131781354 | | | [CG]CT[CG]CTC[CG]CACCCCA |
| | | | | | | | | CCCACTTCCTGTGCT[[CG]]CC |
| | | | | | | | | [[CG]]GGGGG[CG]TGTGC[[CG]]T |
| | | | | | | | | G[[CG]]GCTGC[[CG]]GAGTT |
| | | | | | | | | [[CG]] |
| LHX8_i | LHX8 | 1 | 75602107 | 75602185 | chr1: | 79 | 5789 | GAAGGAGGCTG[[CG]][[CG]]CCA |
| | | | | | 75602107- | | | GCC[CG]CC[CG][CG]G[CG]CC |
| | | | | | 75602185 | | | [[CG]]GGCTCAGG[[CG]]C[[CG]] |
| | | | | | | | | TGA[[CG]]GCTGCA[[CG]][[CG]]CT |
| | | | | | | | | GCCC[[CG]]CACTCTG |
| RALYL_ii | RALYL | 8 | 85095492 | 85095580 | chr8: | 89 | 5790 | CCTGCT[[CG]]TCTGGGCTCACAG |
| | | | | | 85095492- | | | [[CG]]AAGGCAGCCT[[CG]] |
| | | | | | 85095580 | | | [[CG]][[CG]]AGCTGC[[CG]]CTGC |
| | | | | | | | | [CG]CTGCTGC[CG]CCACTGGTG |
| | | | | | | | | TTGC[[CG]]CTCTCAGG[[CG]]C |
| FUT9_ii | FUT9 | 6 | 96463902 | 96464004 | chr6: | 103 | 5791 | [[CG]]CAGCAGCTCCAGATTCACT |
| | | | | | 96463902- | | | GCTCTCCCCTGCAGCTCCC[CG] |
| | | | | | 96464004 | | | [CG]CCCC[[CG]]C[[CG]]CTGT |
| | | | | | | | | [[CG]]CTGCCT[[CG]]GTGTCCCC |
| | | | | | | | | CAGCCCCAGT[[CG]][[CG]]CTC |
| | | | | | | | | TTAGGACAG[[CG]] |
| LINC00403_ | SOX1-OT | 13 | 112717233 | 112717317 | chr13: | 85 | 5792 | CC[[CG]]GTGTCTC[[CG]] |
| iv | | | | | 112717233- | | | [[CG]]AGGG[CG]G[CG]G[CG]G |
| | | | | | 112717317 | | | CCAGCAGA[CG]G[CG]AT[CG]A |
| | | | | | | | | GG[CG][[CG]][[CG]]CCA |
| | | | | | | | | [[CG]]GCA[[CG]]GCCAG[CG]CA |
| | | | | | | | | GACA[[CG]]C[[CG]][[CG]]G |
| CLVS2_ii | CLVS2 | 6 | 123317440 | 123317534 | chr6: | 95 | 5793 | [[CG]]GAC[[CG]]CT[[CG]]GGA |
| | | | | | 123317440- | | | GAGCCCCAGGAGAGGCCAG[[CG]] |
| | | | | | 123317534 | | | C[[CG]][[CG]]CAGCAGC[[CG]]CCC |
| | | | | | | | | [CG]CTG[CG]CCCACCTCCC |
| | | | | | | | | [CG]GCTGCTCC[[CG]]GAGGGCT |
| | | | | | | | | CACAAAG |
| KCNIP4_i | KCNIP4 | 4 | 21950535 | 21950596 | chr4: | 62 | 5794 | GAAG[[CG]]GG[[CG]]GGCTGCA |
| | | | | | 21950535- | | | [[CG]]GG[[CG]]GCT[[CG]]AGTG |
| | | | | | 21950596 | | | [[CG]]GGGACCCCAGCCCCT |
| | | | | | | | | [[CG]]CCCT[[CG]]TGAGC |
| NET01_i | NETO1 | 18 | 70534272 | 70534346 | chr18: | 75 | 5795 | AC[[CG]]TTCTC[[CG]]GCAGGTT |
| | | | | | 70534272- | | | TTGGGATC[[CG]]G[[CG]]A |
| | | | | | 70534346 | | | [[CG]]GCTGAC[[CG]][[CG]] |
| | | | | | | | | [CG]C[CG]CCCCCA[[CG]]CC |
| | | | | | | | | [[CG]]GTTCCA[[CG]]ATGCTG |
| CLEC14A_i | CLEC14A | 14 | 38724596 | 38724678 | chr14: | 83 | 5796 | T[[CG]]GTCCCAGGTGGACTGAAG |
| | | | | | 38724596- | | | TCCAGAG[CG]G[CG]CTGTGCAG |
| | | | | | 38724678 | | | CTGGAAGGG[[CG]][[CG]] |
| | | | | | | | | [[CG]]ATAGCTCAAGTTAGAGG |
| | | | | | | | | [[CG]]GCCC[[CG]]GG |
| GSX1_iii | GSX1 | 13 | 28366785 | 28366866 | chr13: | 82 | 5797 | [[CG]]CAGAGGG[[CG]]GGCTGGCT |
| | | | | | 28366785- | | | G[CG]GGG[[CG]]AC[[CG]] |
| | | | | | 28366866 | | | [[CG]][[CG]]C[[CG]]GGGCCATGC |
| | | | | | | | | [CG][CG]CTCCTTCCTGGTGGAC |
| | | | | | | | | T[[CG]]CTAGTGCTG[[CG]]C |
| ZNF536_ii | ZNF536 | 19 | 30866195 | 30866279 | chr19: | 85 | 5798 | GAG[[CG]]GC[[CG]]CACTTCACC |
| | | | | | 30866195- | | | TTA[CG]GAGGGGAGATAATGAGA |
| | | | | | 30866279 | | | TCAATTAGAGG[[CG]]C[[CG]]TC |
| | | | | | | | | AC[[CG]][[CG]]C[CG]GAGACAG |
| | | | | | | | | CTGC[[CG]][[CG]]CA |
| PDEIC_ii | PDE1C | 7 | 32467624 | 32467704 | chr7: | 81 | 5799 | [[CG]][[CG]]AATGGGTCTC |
| | | | | | 32467624- | | | [[CG]]ACAGCAA[CG]GGAGCAGC |
| | | | | | 32467704 | | | [[CG]]GTGG[[CG]]CCTCAGGCTG |
| | | | | | | | | [[CG]]GTGGCAA[[CG]]AGCC |
| | | | | | | | | [[CG]]ACTGCACTA[[CG]]GC |
| MDGA_I | MDGA2 | 14 | 48144084 | 48144198 | chr14: | 115 | 5800 | GGGTGCCTGGGAAAAT[[CG]]CAG |
| | | | | | 48144084- | | | A[CG]C[CG]GGGAGGAGCAGGGG |
| | | | | | 48144198 | | | G[CG]GTGATGGGAAGGGGAGCTG |
| | | | | | | | | [[CG]]AGG[[CG]]AAGTGTTCTT |
| | | | | | | | | CAGGGAAG[[CG]]GGCT[CG]AG |
| | | | | | | | | TCTC[[CG]]CAGCTG[[CG]]G |
| | | | | | | | | [[CG]] |
| MHC_ii | N/A | 6 | 29521375 | 29521459 | chr6: | 85 | 5801 | GCC[[CG]]CTG[[CG]]CTATG[[CG]] |
| | | | | | 29521375- | | | GGGCT[CG]TCTCCC[[CG]][[CG]]C |
| | | | | | 29521459 | | | CTATGT[[CG]]CA[[CG]]CTGGCCA |
| | | | | | | | | G[CG]CCTCCTGGCTAAG[[CG]]G |
| | | | | | | | | CCTCACCAACTC |
| NID2_i | NID2 | 14 | 52536129 | 52536198 | chr14: | 70 | 5802 | TGCAGGAGATGAGCTCAG[[CG]]C |
| | | | | | 52536129- | | | AAAGGGAACCC[[CG]]CAG[[CG]] |
| | | | | | 52536198 | | | G[[CG]]AGTG[[CG]]GCTGCTGGCCT |
| | | | | | | | | G[[CG]][[CG]]CTGTGG |
| ZIC4 | ZIC4 | 3 | 147108796 | 147108884 | chr3: | 89 | 5803 | GG[[CG]]ACA[[CG]]AGGGCAGA |
| | | | | | 147108796- | | | [[CG]]GTGTAGC[CG]AAT[[CG]] |
| | | | | | 147108884 | | | TAGCCAGAGCTGGG[[CG]]G |
| | | | | | | | | [[CG]]G[[CG]]AG[[CG]]CC[CG]T |
| | | | | | | | | GCACCTTCATGTGCTTA[[CG]]CA |
| | | | | | | | | G[[CG]]A |
| RCN1_i | RCN1 | 11 | 32008959 | 32009042 | chr11: | 84 | 5804 | [[CG]][[CG]]AAGGAAAGTGCT |
| | | | | | 32008959- | | | A[[CG]]AA[CG]TCAAATGGC |
| | | | | | 32009042 | | | [[CG]]CCCCC[[CG]][[CG]]A |
| | | | | | | | | [[CG]]CCATCTGCTCTG[[CG]]AAG |
| | | | | | | | | CAGAAA[[CG]]G[[CG]]GCAGCT |
| | | | | | | | | G[[CG]] |
| RYR2_i | RYR2 | 1 | 237205344 | 237205410 | chr1: | 67 | 5805 | G[[CG]]CTGGGCCT[[CG]]GGTTTGG |
| | | | | | 237205344- | | | [CG]GCC[[CG]]GAGGAG |
| | | | | | 237205410 | | | [[CG]]GGCTG[[CG]]GATTACCT |
| | | | | | | | | GCAGCAG[[CG]]GGGAGC[[CG]] |
| MSC_ii | MSC | 8 | 72756267 | 72756348 | chr8: | 82 | 5806 | CTCCTCTGC[[CG]]A[[CG]]AGTTG |
| | | | | | 72756267- | | | TCACTGGG[CG]AGG[[CG]]TAGC |
| | | | | | 72756348 | | | TG[[CG]]CTCTA[[CG]]C[[CG]] |
| | | | | | | | | [[CG]]GAGGGG[[CG]]GCCTCTT |
| | | | | | | | | GGAGG[[CG]]GGGACC |
| LINC00403_i | SOX1-OT | 13 | 112711967 | 112712052 | chr13: | 86 | 5807 | TGAGC[[CG]]CAAGCCTTGGACT |
| | | | | | 112711967- | | | [[CG]]CAGAGCTGC[[CG]]GTGCC |
| | | | | | 112712052 | | | [[CG]]TC[[CG]]AGAGCCCCACCAG |
| | | | | | | | | [[CG]][CG]GCTCA[[CG]]CCTCAG |
| | | | | | | | | TCT[[CG]][[CG]]CCCC |
| RBFOX_i | RBFOX1 | 16 | 6069328 | 6069403 | chr16: | 76 | 5808 | [[CG]]CTGC[[CG]]C[[CG]]CCTCCT |
| | | | | | 6069328- | | | CCAGCCAGAGT[[CG]]GTGGGACT |
| | | | | | 6069403 | | | GGCTG[[CG]]CTGCCCTGAAGTGGT |
| | | | | | | | | TCTCCAAGCAG[[CG]][[CG]]G |
| GALR1_i | GALR1 | 18 | 74962595 | 74962684 | chr18: | 90 | 5809 | GTGGAGAACTT[[CG]]TCA[[CG]]CT |
| | | | | | 74962595- | | | GGTGGTGTT[[CG]]GCCTGATCT |
| | | | | | 74962684 | | | T[[CG]][[CG]]CTGGGTGTGCTGG |
| | | | | | | | | GCAACAGCCTAGTGATCAC[[CG]] |
| | | | | | | | | TGCTGG[[CG]][[CG]]C |
| RNF291_ii | RNF219- | 13 | 79170284 | 79170367 | chr13: | 84 | 5810 | GGCCTAAGGC[[CG]]TTGACCT |
| | AS1 | | | | 79170284- | | | [[CG]]GGTTCTCCC[[CG]]GCACAG |
| | | | | | 79170367 | | | T[[CG]]AATCCA[[CG]]CCAGGGC |
| | | | | | | | | CCTCAGGC[[CG]]GTAGCTGTCCT |
| | | | | | | | | GCAGTCC |
| REG39_i | N/A | 19 | 22444593 | 22444663 | chr19: | 71 | 5811 | [[CG]]GACT[[CG]]GAGC[[CG]]TCC |
| | | | | | 22444593- | | | CTGCCAGTGGCTTT[[CG]]TGGG |
| | | | | | 22444663 | | | [[CG]]GCCC[[CG]]CCTTGGAGCCC |
| | | | | | | | | AGGCCAA[[CG]]AGC[[CG]]C |
| RP4_ii | N/A | 12 | 126676038 | 126676139 | chr12: | 102 | 5812 | GGGCAAGGGC[[CG]]GGGC |
| | | | | | 126676038- | | | [[CG]]GACACAGGAGCAG[[CG]] |
| | | | | | 126676139 | | | GGGATGC[[CG]]GGTG[[CG]]CT |
| | | | | | | | | C[[CG]]AGGGTGTGGCCCC[CG]G |
| | | | | | | | | GCTGTG[[CG]]GGGCTCAGAGCTG |
| | | | | | | | | CTTGCTGGG[[CG]]C |
| ELAVL4_i | ELAVL4 | 1 | 50513718 | 50513788 | chr1: | 71 | 5813 | [[CG]]GAGC[[CG]]CAGAG |
| | | | | | 50513718- | | | [[CG]]AGCTAGAGAG[[CG]]AGA |
| | | | | | 50513788 | | | G[[CG]]GTGAGACTCTG[[CG]]GA |
| | | | | | | | | [CG]TCTTCC[[CG]]CC[[CG]] |
| | | | | | | | | C[[CG]][[CG]]CTCC |
| SERTM1_ii | SERTM1 | 13 | 37248238 | 37248321 | chr13: | 84 | 5814 | [[CG]]GG[[CG]][[CG]]TAT |
| | | | | | 37248238- | | | [[CG]]TCCAGAC[CG]GAGCAC |
| | | | | | 37248321 | | | [CG]CCCCAC[[CG]]CTAG |
| | | | | | | | | [[CG]]CAGGAGACCTGC[[CG]]G |
| | | | | | | | | GGAAGT[[CG]][[CG]]TGTCCTGA |
| | | | | | | | | CCTGCAG |

Cancer-related CpGs for analysis

[0234] In any of the assays described herein, in a sample which has been taken from an individual, the sample comprises a population of DNA molecules.

[0235] The assay of the invention further comprises determining in the population of DNA molecules in the sample the methylation status of a panel of:
[0236] (i) one or more CpGs selected from a panel of CpGs identified in SEQ ID NOs 1 to 5000 wherein the CpGs are identified at nucleotide positions 61 to 62; and/or
[0237] (ii) one or more CpGs selected from within a panel of one or more Differentially Methylated Regions (DMRs) defined by SEQ ID NOs 5001 to 5418, wherein the CpGs are denoted by CG

[0238] A cancer index value is then derived based on the methylation status of the one or more CpGs in the panel, which is used to assess the presence, absence or development of CIN3 and/or cancer, particularly cervical or endometrial cancer, most preferably cervical cancer, in the individual based on the cancer index value.

[0239] In any of the assays described herein, in DNA derived from cells in the sample the methylation status of each CpG in a panel of
[0240] (i) one or more CpGs selected from a panel of CpGs identified in SEQ ID NOs 1 to 5000 wherein the CpGs are identified at nucleotide positions 61 to 62; and/or
[0241] (ii) one or more CpGs selected from within a panel of one or more Differentially Methylated Regions (DMRs) defined by SEQ ID NOs 5001 to 5418, wherein the CpGs are denoted by CG, is determined.

[0242] In any of the assays described herein, in DNA derived from cells in the sample the methylation status of each CpG in a panel of one or more CpGs from a panel of CpGs identified at nucleotide positions 61 to 62 in SEQ ID NOs 1 to 5000, is determined.

[0243] In any of the assays described herein, the panel of one or more CpGs may comprise at least 500 CpGs selected from the CpGs identified at nucleotide positions 61 to 62 in SEQ ID NOs 1 to 5000, preferably wherein the assay is characterised as having a receiver operating characteristics (ROC) area under the curve (AUC) of at least 0.80. The panel of one or more CpGs may comprise at least the CpGs identified at nucleotide positions 61 to 62 in SEQ ID NOs 1 to 5000, preferably wherein the assay is characterised as having an ROC AUC of at least 0.92.

[0244] In any of the assays described herein, the panel of one or more CpGs may comprise at least 1000 CpGs selected from the CpGs identified at nucleotide positions 61 to 62 in SEQ ID NOs 1 to 5000, preferably wherein the assay is characterised as having a ROC AUC of at least 0.80. The panel of one or more CpGs may comprise at least the CpGs identified in SEQ ID NOs 1 to 1000 and identified at nucleotide positions 61 to 62, preferably wherein the assay is characterised as having a ROC AUC of at least 0.92.

[0245] In any of the assays described herein, the panel of one or more CpGs may comprise at least 1500 CpGs selected from the CpGs identified at nucleotide positions 61 to 62 in SEQ ID NOs 1 to 5000, preferably wherein the assay is characterised as having a ROC AUC of at least 0.82. The panel of one or more CpGs may comprise at least the CpGs identified in SEQ ID NOs 1 to 1500 and identified at nucleotide positions 61 to 62, preferably wherein the assay is characterised as having a ROC AUC of at least 0.92.

[0246] In any of the assays described herein, the panel of one or more CpGs may comprise at least 2000 CpGs selected from the CpGs identified at nucleotide positions 61 to 62 in SEQ ID NOs 1 to 5000, preferably wherein the assay is characterised as having an AUC of at least 0.81. The panel of one or more CpGs may comprise at least the CpGs identified in SEQ ID NOs 1 to 200 and identified at nucleotide positions 61 to 62, preferably wherein the assay is characterised as having a ROC AUC of at least 0.92.

[0247] In any of the assays described herein, the panel of one or more CpGs may comprise at least the 5000 CpGs identified at nucleotide positions 61 to 62 in SEQ ID NOs 1 to 5000, and further wherein the assay is characterised as having a ROC AUC of at least 0.92.

[0248] In any of the above-described assays, the assay may be characterised as having a ROC AUC of 0.60 or more, 0.61 or more, 0.62 or more, 0.63 or more, 0.64 or more, 0.65 or more, 0.66 or more, 0.67 or more, 0.68 or more, 0.69 or more, 0.70 or more, 0.71 or more, 0.72 or more, 0.73 or more, 0.74 or more, 0.75 or more, 0.76 or more, 0.77 or more, 0.78 or more, 0.79 or more, 0.80 or more, 0.81 or more, 0.82 or more, 0.83 or more, 0.84 or more, 0.85 or more, 0.86 or more, 0.87 or more, 0.88 or more, 0.89 or more or 0.90 or more.

[0249] In any of the described assays, the methylation status of the one or more CpGs in the panel is preferably determined by a β-value analysis, and the assay is for assessing the presence, absence or development of CIN3 and/or cancer, preferably the cancer is cervical cancer or endometrial cancer. Most preferably, the cancer is cervical cancer.

[0250] In any of the assays described herein, the panel of one or more CpGs may comprise at least 500 CpGs selected from the CpGs identified at nucleotide positions 61 to 62 in SEQ ID NOs 1 to 5000, optionally wherein:
[0251] 1. the assay is characterised as having an ROC AUC (AUC) of at least 0.92, and more preferably wherein the panel of one or more CpGs comprises at least the CpGs identified in SEQ ID NOs 1 to 500 and identified at nucleotide positions 61 to 62;
[0252] 2. the assay is characterised as having an AUC of at least 0.90, and more preferably wherein the panel of one or more CpGs comprises at least the CpGs identified in SEQ ID NOs 501 to 1000 and identified at nucleotide positions 61 to 62;
[0253] 3. the assay is characterised as having an AUC of at least 0.88, and more preferably wherein the panel of one or more CpGs comprises at least the CpGs identified in SEQ ID NOs 1001 to 1500 and identified at nucleotide positions 61 to 62;
[0254] 4. the assay is characterised as having an AUC of at least 0.86, and more preferably wherein the panel of one or more CpGs comprises at least the CpGs identified in SEQ ID NOs 1501 to 2000 and identified at nucleotide positions 61 to 62;
[0255] 5. the assay is characterised as having an AUC of at least 0.86, and more preferably wherein the panel of one or more CpGs comprises at least the CpGs identified in SEQ ID NOs 2001 to 2500 and identified at nucleotide positions 61 to 62;
[0256] 6. the assay is characterised as having an AUC of at least 0.83, and more preferably wherein the panel of one or more CpGs comprises at least the CpGs identified in SEQ ID NOs 2501 to 3000 and identified at nucleotide positions 61 to 62;
[0257] 7. the assay is characterised as having an AUC of at least 0.82, and more preferably wherein the panel of one or more CpGs comprises at least the CpGs identified in SEQ ID NOs 3001 to 3500 and identified at nucleotide positions 61 to 62;
[0258] 8. the assay is characterised as having an AUC of at least 0.82, and more preferably wherein the panel of one or more CpGs comprises at least the CpGs identified in SEQ ID NOs 3501 to 4000 and identified at nucleotide positions 61 to 62; or
[0259] 9. the assay is characterised as having an AUC of at least 0.80, and more preferably wherein the panel of one or more CpGs comprises at least the CpGs identified in SEQ ID NOs 4001 to 4500 and identified at nucleotide positions 61 to 62;
[0260] 10. the assay is characterised as having an AUC of at least 0.81, and more preferably wherein the panel of one or more CpGs comprises at least the CpGs identified in SEQ ID NOs 4501 to 5000 and identified at nucleotide positions 61 to 62.

[0261] In any of the described assays, the methylation status of the one or more CpGs in the panel is preferably determined by a β-value analysis, and the assay is for assessing the presence, absence or development of CIN3 and/or cancer, preferably the cancer is cervical cancer or endometrial cancer. Most preferably, the cancer is cervical cancer.

[0262] In any of the above-described assays, the assay may be characterised as having a ROC AUC of 0.60 or more, 0.61 or more, 0.62 or more, 0.63 or more, 0.64 or more, 0.65 or more, 0.66 or more, 0.67 or more, 0.68 or more, 0.69 or more, 0.70 or more, 0.71 or more, 0.72 or more, 0.73 or more, 0.74 or more, 0.75 or more, 0.76 or more, 0.77 or more, 0.78 or more, 0.79 or more, 0.80 or more, 0.81 or more, 0.82 or more, 0.83 or more, 0.84 or more, 0.85 or more, 0.86 or more, 0.87 or more, 0.88 or more, 0.89 or more or 0.90 or more.

[0263] In any of the assays described herein, the panel of one or more CpGs may comprise:
[0264] 1. at least 100 CpGs selected from the CpGs identified at nucleotide positions 61 to 62 in SEQ ID NOs 1 to 5000, preferably wherein the assay is characterised as having an AUC of at least 0.90, and more preferably wherein the panel of one or more CpGs comprises at least the CpGs identified in SEQ ID NOs 1 to 100 and identified at nucleotide positions 61 to 62;
[0265] 2. at least 500 CpGs selected from the CpGs identified in SEQ ID NOs 1 to 500 and identified at nucleotide positions 61 to 62, preferably wherein the assay is characterised as having an AUC of at least 0.92, and more preferably wherein the panel of one or more CpGs comprises at least the CpGs identified in SEQ ID NOs 1 to 500 and identified at nucleotide positions 61 to 62;
[0266] 3. at least 1000 CpGs selected from the CpGs identified in SEQ ID NOs 1 to 500 and identified at nucleotide positions 61 to 62, preferably wherein the assay is characterised as having an AUC of at least 0.92, and more preferably wherein the panel of one or more CpGs comprises at least the CpGs identified in SEQ ID NOs 1 to 1000 and identified at nucleotide positions 61 to 62;
[0267] 4. at least 1500 CpGs selected from the CpGs identified in SEQ ID NOs 1 to 500 and identified at nucleotide positions 61 to 62, preferably wherein the assay is characterised as having an AUC of at least 0.92, and more preferably wherein the panel of one or more CpGs comprises at least the CpGs identified in SEQ ID NOs 1 to 1500 and identified at nucleotide positions 61 to 62;
[0268] 5. at least 2000 CpGs selected from the CpGs identified in SEQ ID NOs 1 to 500 and identified at nucleotide positions 61 to 62, preferably wherein the assay is characterised as having an AUC of at least 0.92, and more preferably wherein the panel of one or more CpGs comprises at least the CpGs identified in SEQ ID NOs 1 to 2000 and identified at nucleotide positions 61 to 62;
[0269] 6. at least 2500 CpGs selected from the CpGs identified in SEQ ID NOs 1 to 500 and identified at nucleotide positions 61 to 62, preferably wherein the assay is characterised as having an AUC of at least 0.92, and more preferably wherein the panel of one or more CpGs comprises at least the CpGs identified in SEQ ID NOs 1 to 2500 and identified at nucleotide positions 61 to 62;
[0270] 7. at least 3000 CpGs selected from the CpGs identified in SEQ ID NOs 1 to 500 and identified at nucleotide positions 61 to 62, preferably wherein the assay is characterised as having an AUC of at least 0.92, and more preferably wherein the panel of one or more CpGs comprises at least the CpGs identified in SEQ ID NOs 1 to 3000 and identified at nucleotide positions 61 to 62;
[0271] 8. at least 3500 CpGs selected from the CpGs identified in SEQ ID NOs 1 to 500 and identified at nucleotide positions 61 to 62, preferably wherein the assay is characterised as having an AUC of at least 0.92, and more preferably wherein the panel of one or more CpGs comprises at least the CpGs identified in SEQ ID NOs 1 to 3500 and identified at nucleotide positions 61 to 62;
[0272] 9. at least 4000 CpGs selected from the CpGs identified in SEQ ID NOs 1 to 500 and identified at nucleotide positions 61 to 62, preferably wherein the assay is characterised as having an AUC of at least 0.92, and more preferably wherein the panel of one or more CpGs comprises at least the CpGs identified in SEQ ID NOs 1 to 4000 and identified at nucleotide positions 61 to 62;
[0273] 10. at least 4500 CpGs selected from the CpGs identified in SEQ ID NOs 1 to 500 and identified at nucleotide positions 61 to 62, preferably wherein the assay is characterised as having an AUC of at least 0.92, and more preferably wherein the panel of one or more CpGs comprises at least the CpGs identified in SEQ ID NOs 1 to 4500 and identified at nucleotide positions 61 to 62; or
[0274] 11. at least 5000 CpGs selected from the CpGs identified in SEQ ID NOs 1 to 500 and identified at nucleotide positions 61 to 62, preferably wherein the assay is characterised as having an AUC of at least 0.92, and more preferably wherein the panel of one or more CpGs comprises at least the CpGs identified at nucleotide positions 61 to 62 in SEQ ID NOs 1 to 5000.

[0275] In any of the described assays, the methylation status of the one or more CpGs in the panel is preferably determined by a β-value analysis, and the assay is for assessing the presence, absence or development of CIN3 and/or cancer, preferably the cancer is cervical cancer or endometrial cancer. Most preferably, the cancer is cervical cancer.

[0276] In any of the above-described assays, the assay may be characterised as having a ROC AUC of 0.60 or more, 0.61 or more, 0.62 or more, 0.63 or more, 0.64 or more, 0.65 or more, 0.66 or more, 0.67 or more, 0.68 or more, 0.69 or more, 0.70 or more, 0.71 or more, 0.72 or more, 0.73 or more, 0.74 or more, 0.75 or more, 0.76 or more, 0.77 or more, 0.78 or more, 0.79 or more, 0.80 or more, 0.81 or more, 0.82 or more, 0.83 or more, 0.84 or more, 0.85 or more, 0.86 or more, 0.87 or more, 0.88 or more, 0.89 or more or 0.90 or more.

[0277] In any of the assays described herein, the panel of one or more CpGs may comprise:
[0278] 1. at least 500 CpGs selected from the CpGs identified at nucleotide positions 61 to 62 in SEQ ID NOs 1 to 5000, preferably wherein the assay is characterised as having an AUC of at least 0.81, and more preferably wherein the panel of one or more CpGs comprises at least the CpGs identified in SEQ ID NOs 4501 to 5000 and identified at nucleotide positions 61 to 62;
[0279] 2. at least 1000 CpGs selected from the CpGs identified at nucleotide positions 61 to 62 in SEQ ID NOs 1 to 5000, preferably wherein the assay is characterised as having an AUC of at least 0.80, and more preferably wherein the panel of one or more CpGs comprises at least the CpGs identified in SEQ ID NOs 4001 to 5000 and identified at nucleotide positions 61 to 62;
[0280] 3. at least 1500 CpGs selected from the CpGs identified at nucleotide positions 61 to 62 in SEQ ID NOs 1 to 5000, preferably wherein the assay is characterised as having an AUC of at least 0.82, and more preferably wherein the panel of one or more CpGs comprises at least the CpGs identified in SEQ ID NOs 3501 to 5000 and identified at nucleotide positions 61 to 62;
[0281] 4. at least 2000 CpGs selected from the CpGs identified at nucleotide positions 61 to 62 in SEQ ID NOs 1 to 5000, preferably wherein the assay is characterised as having an AUC of at least 0.81, and more preferably wherein the panel of one or more CpGs comprises at least the CpGs identified in SEQ ID NOs 3001 to 5000 and identified at nucleotide positions 61 to 62;
[0282] 5. at least 2500 CpGs selected from the CpGs identified at nucleotide positions 61 to 62 in SEQ ID NOs 1 to 5000, preferably wherein the assay is characterised as having an AUC of at least 0.82, and more preferably wherein the panel of one or more CpGs comprises at least the CpGs identified in SEQ ID NOs 2501 to 5000 and identified at nucleotide positions 61 to 62;
[0283] 6. at least 3000 CpGs selected from the CpGs identified at nucleotide positions 61 to 62 in SEQ ID NOs 1 to 5000, preferably wherein the assay is characterised as having an AUC of at least 0.82, and more preferably wherein the panel of one or more CpGs comprises at least the CpGs identified in SEQ ID NOs 2001 to 5000 and identified at nucleotide positions 61 to 62;
[0284] 7. at least 3500 CpGs selected from the CpGs identified at nucleotide positions 61 to 62 in SEQ ID NOs 1 to 5000, preferably wherein the assay is characterised as having an AUC of at least 0.82, and more preferably wherein the panel of one or more CpGs comprises at least the CpGs identified in SEQ ID NOs 1501 to 5000 and identified at nucleotide positions 61 to 62;
[0285] 8. at least 4000 CpGs selected from the CpGs identified at nucleotide positions 61 to 62 in SEQ ID NOs 1 to 5000, preferably wherein the assay is characterised as having an AUC of at least 0.84, and more preferably wherein the panel of one or more CpGs comprises at least the CpGs identified in SEQ ID NOs 1001 to 5000 and identified at nucleotide positions 61 to 62;
[0286] 9. at least 4500 CpGs selected from the CpGs identified at nucleotide positions 61 to 62 in SEQ ID NOs 1 to 5000, preferably wherein the assay is characterised as having an AUC of at least 0.88, and more preferably wherein the panel of one or more CpGs comprises at least the CpGs identified in SEQ ID NOs 501 to 5000 and identified at nucleotide positions 61 to 62;
[0287] 10. at least 4900 CpGs selected from the CpGs identified at nucleotide positions 61 to 62 in SEQ ID NOs 1 to 5000, preferably wherein the assay is characterised as having an AUC of at least 0.91, and more preferably wherein the panel of one or more CpGs comprises at least the CpGs identified in SEQ ID NOs 101 to 5000 and identified at nucleotide positions 61 to 62; or
[0288] 11. at least 5000 CpGs selected from the CpGs identified at nucleotide positions 61 to 62 in SEQ ID NOs 1 to 5000, preferably wherein the assay is characterised as having an AUC of at least 0.92, and more preferably wherein the panel of one or more CpGs comprises at least the CpGs identified at nucleotide positions 61 to 62 in SEQ ID NOs 1 to 5000.

[0289] In any of the described assays, the methylation status of the one or more CpGs in the panel is preferably determined by a β-value analysis, and the assay is for assessing the presence, absence or development of CIN3 and/or cancer, preferably the cancer is cervical cancer or endometrial cancer. Most preferably, the cancer is cervical cancer.

[0290] In any of the above-described assays, the assay may be characterised as having a ROC AUC of 0.60 or more, 0.61 or more, 0.62 or more, 0.63 or more, 0.64 or more, 0.65 or more, 0.66 or more, 0.67 or more, 0.68 or more, 0.69 or more, 0.70 or more, 0.71 or more, 0.72 or more, 0.73 or more, 0.74 or more, 0.75 or more, 0.76 or more, 0.77 or more, 0.78 or more, 0.79 or more, 0.80 or more, 0.81 or more, 0.82 or more, 0.83 or more, 0.84 or more, 0.85 or more, 0.86 or more, 0.87 or more, 0.88 or more, 0.89 or more or 0.90 or more.

[0291] In any of the assays described herein, the step of determining the methylation status of the one or more CpGs in the panel may comprise determining the methylation status of one or more CpGs selected from within a panel of one or more Differentially Methylated Regions (DMRs) defined by SEQ ID NOs 5001 to 5418, wherein selected CpGs in each DMR are denoted by CG. The nucleotide sequences of the 418 DMRs are defined respectively by the nucleotide sequences of SEQ ID NO: 5001 to 5418 as set out in Table 1, accepting that variation in the nucleotide sequence of any given DMR may exist due to sequencing errors and/or variation between individuals. In each sequence shown below the cytosine of the CG dinucleotide motifs identified in square brackets and double square brackets is a cytosine of a CpG which may be included in a panel of CpGs when performing the assays of the invention.

[0292] In any of the assays described herein, the step of determining the methylation status of the one or more CpGs in the panel may comprise determining the methylation status of one or more CpGs denoted by CG within any one or more DMRs or within any combination of two or more DMRs defined by SEQ ID NOs 5001 to 5418, wherein selected CpGs in each DMR are denoted by CG. The DMRs are selected from the group consisting of DMRs 1 to 418 (SEQ ID NOs 5001 to 5418; as set out in Table 1).

[0293] The step of determining the methylation status of a panel of one or more CpGs may comprise determining a cancer index value of one or more of the CpGs denoted by CG within any one of the DMRs 1 to 418, or within any combination of two or more DMRs of 1 to 418.

[0294] The step of determining the methylation status of a panel of one or more CpGs may comprise determining a cancer index value of two or more, three or more, four or more, five or more, six or more, seven or more, eight or more, or nine or more of the CpGs denoted by CG within any one of the DMRs 1 to 418 (defined by SEQ ID NOs 5001 to 5418), optionally within any combination of two or more DMRs of 1 to 418.

[0295] The panel of one or more CpGs may comprise two or more CpGs of the DMR(s), three or more CpGs of the DMR(s), four or more CpGs of the DMR(s) or all CpGs of the DMR(s).

[0296] The step of determining the methylation status of a panel of one or more CpGs may comprise determining a cancer index value of least two or more, three or more, four or more, five or more, six or more, seven or more, eight or more, or nine or more of the CpGs denoted by CG within any one of the DMRs 1 to 418, or within:
[0297] a. any combination of two, three, four, five, six, seven, eight, or nine or more of DMRs 1 to 418;
[0298] b. any combination of ten, twenty, thirty, forty, fifty, sixty, seventy, eighty, or ninety or more of DMRs 1 to 418;
[0299] c. all 418 of DMRs 1 to 418;
[0300] d. one DMR defined by SEQ ID NO: 5001, two DMRs defined by SEQ ID NOs: 5001 to 5002, three DMRs defined by SEQ ID NOs: 5001 to 5003, four DMRs defined by SEQ ID NOs: 5001 to 5004, five DMRs defined by SEQ ID NOs: 5001 to 5005, six DMRs defined by SEQ ID NOs: 5001 to 5006, seven DMRs defined by SEQ ID NOs: 5001 to 5007, eight DMRs defined by SEQ ID NOs: 5001 to 5008, or nine DMRs defined by SEQ ID NOs: 5001 to 5009;
[0301] e. any combination of one or more DMRs defined by SEQ ID NO: 5391, SEQ ID NO: 5392, SEQ ID NO: 5393, SEQ ID NO: 5407 and SEQ ID NO: 5414, preferably within all of SEQ ID NO: 5391, SEQ ID NO: 5392, SEQ ID NO: 5393, SEQ ID NO: 5407 and SEQ ID NO: 5414;
[0302] f. any combination of one or more DMRs defined by SEQ ID NO: 5392, SEQ ID NO: 5393 and SEQ ID NO: 5407, preferably within all of SEQ ID NO: 5392, SEQ ID NO: 5393 and SEQ ID NO: 5407; or
[0303] g. ten DMRs defined by SEQ ID NOs: 5001 to 5010, twenty DMRs defined by SEQ ID NOs: 5001 to 5020, thirty DMRs defined by SEQ ID NOs: 5001 to 5030, forty DMRs defined by SEQ ID NOs: 5001 to 5040, fifty DMRs defined by SEQ ID NOs: 5001 to 5050, sixty DMRs defined by SEQ ID NOs: 5001 to 5060, seventy DMRs defined by SEQ ID NOs: 5001 to 5070, eighty DMRs defined by SEQ ID NOs: 5001 to 5080, or ninety DMRs defined by SEQ ID NOs: 5001 to 5090;
[0304] h. fifty DMRs defined by SEQ ID NOs: 5001 to 5050, SEQ ID NOs: 5051 to 5100, SEQ ID NOs: 5101 to 5150, SEQ ID NOs: 5151 to 5200, SEQ ID NOs: 5201 to 5250, SEQ ID NOs: 5301 to 5350, or SEQ ID NOs: 5341 to 5418; or
[0305] i. eighty one DMRs defined by SEQ ID NOs: 5015, 5016, 5017, 5025, 5026, 5027, 5028, 5029, 5032, 5033, 5048, 5049, 5050, 5053, 5054, 5057, 5068, 5069, 5071, 5072, 5073, 5074, 5075, 5076, 5077, 5083, 5090, 5091, 5092, 5093, 5094, 5095, 5096, 5099, 5102, 5137, 5138, 5140, 5143, 5146, 5147, 5148, 5149, 5150, 5151, 5164, 5165, 5167, 5175, 5176, 5177, 5179, 5180, 5185, 5204, 5224, 5226, 5228, 5232, 5246, 5248, 5285, 5287, 5293, 5307, 5309, 5315, 5317, 5324, 5328, 5337, 5339, 5340, 5348, 5349, 5354, 5361, 5362, 5366, 5368 and 5377.

[0306] In any of the assays described herein, the step of determining the methylation status of a panel of one or more CpGs may comprise determining the methylation status of one or more CpGs within any one or more DMRs selected from the group of DMRs consisting of DMRs 1 to 418 as defined by SEQ ID NOs 5001 to 5418, including:
[0307] 1. one or more CpGs within DMR 1 as defined by SEQ ID NO: 5001 denoted by CG, preferably wherein the assay is characterised as having an ROC AUC of at least 0.894, and more preferably wherein the panel of one or more CpGs comprises at least the CpGs denoted by [[CG]];
[0308] 2. one or more CpGs within DMR 2 as defined by SEQ ID NO: 5002 denoted by CG, preferably wherein the assay is characterised as having an ROC AUC of at least 0.894, and more preferably wherein the panel of one or more CpGs comprises at least the CpGs denoted by [[CG]];
[0309] 3. one or more CpGs within DMR 3 as defined by SEQ ID NO: 5003 denoted by CG, preferably wherein the assay is characterised as having an ROC AUC of at least 0.894, and more preferably wherein the panel of one or more CpGs comprises at least the CpGs denoted by [[CG]];
[0310] 4. one or more CpGs within DMR 4 as defined by SEQ ID NO: 5004 denoted by CG, preferably wherein the assay is characterised as having an ROC AUC of at least 0.894, and more preferably wherein the panel of one or more CpGs comprises at least the CpGs denoted by [[CG]];
[0311] 5. one or more CpGs within DMR 5 as defined by SEQ ID NO: 5005 denoted by CG, preferably wherein the assay is characterised as having an ROC AUC of at least 0.894, and more preferably wherein the panel of one or more CpGs comprises at least the CpGs denoted by [[CG]];
[0312] 6. one or more CpGs within DMR 6 as defined by SEQ ID NO: 5006 denoted by CG, preferably wherein the assay is characterised as having an ROC AUC of at least 0.876, and more preferably wherein the panel of one or more CpGs comprises at least the CpGs denoted by [[CG]];
[0313] 7. one or more CpGs within DMR 7 as defined by SEQ ID NO: 5007 denoted by CG, preferably wherein the assay is characterised as having an ROC AUC of at least 0.874, and more preferably wherein the panel of one or more CpGs comprises at least the CpGs denoted by [[CG]];
[0314] 8. one or more CpGs within DMR 8 as defined by SEQ ID NO: 5008 denoted by CG, preferably wherein the assay is characterised as having an ROC AUC of at least 0.874, and more preferably wherein the panel of one or more CpGs comprises at least the CpGs denoted by [[CG]];
[0315] 9. one or more CpGs within DMR 9 as defined by SEQ ID NO: 5009 denoted by CG, preferably wherein the assay is characterised as having an ROC AUC of at least 0.874, and more preferably wherein the panel of one or more CpGs comprises at least the CpGs denoted by [[CG]];
[0316] 10. one or more CpGs within DMR 10 as defined by SEQ ID NO: 5010 denoted by CG, preferably wherein the assay is characterised as having an ROC AUC of at least 0.874, and more preferably wherein the panel of one or more CpGs comprises at least the CpGs denoted by [[CG]];
[0317] 11. one or more CpGs within DMR 11 as defined by SEQ ID NO: 5011 denoted by CG, preferably wherein the assay is characterised as having an ROC AUC of at least 0.874, and more preferably wherein the panel of one or more CpGs comprises at least the CpGs denoted by [[CG]];
[0318] 12. one or more CpGs within DMR 12 as defined by SEQ ID NO: 5012 denoted by CG, preferably wherein the assay is characterised as having an ROC AUC of at least 0.874, and more preferably wherein the panel of one or more CpGs comprises at least the CpGs denoted by [[CG]];
[0319] 13. one or more CpGs within DMR 13 as defined by SEQ ID NO: 5013 denoted by CG, preferably wherein the assay is characterised as having an ROC AUC of at least 0.874, and more preferably wherein the panel of one or more CpGs comprises at least the CpGs denoted by [[CG]];
[0320] 14. one or more CpGs within DMR 14 as defined by SEQ ID NO: 5014 denoted by CG, preferably wherein the assay is characterised as having an ROC AUC of at least 0.87, and more preferably wherein the panel of one or more CpGs comprises at least the CpGs denoted by [[CG]];
[0321] 15. one or more CpGs within DMR 15 as defined by SEQ ID NO: 5015 denoted by CG, preferably wherein the assay is characterised as having an ROC AUC of at least 0.869, and more preferably wherein the panel of one or more CpGs comprises at least the CpGs denoted by [[CG]];
[0322] 16. one or more CpGs within DMR 16 as defined by SEQ ID NO: 5016 denoted by CG, preferably wherein the assay is characterised as having an ROC AUC of at least 0.869, and more preferably wherein the panel of one or more CpGs comprises at least the CpGs denoted by [[CG]];
[0323] 17. one or more CpGs within DMR 17 as defined by SEQ ID NO: 5017 denoted by CG, preferably wherein the assay is characterised as having an ROC AUC of at least 0.869, and more preferably wherein the panel of one or more CpGs comprises at least the CpGs denoted by [[CG]];
[0324] 18. one or more CpGs within DMR 18 as defined by SEQ ID NO: 5018 denoted by CG, preferably wherein the assay is characterised as having an ROC AUC of at least 0.868, and more preferably wherein the panel of one or more CpGs comprises at least the CpGs denoted by [[CG]];
[0325] 19. one or more CpGs within DMR 19 as defined by SEQ ID NO: 5019 denoted by CG, preferably wherein the assay is characterised as having an ROC AUC of at least 0.868, and more preferably wherein the panel of one or more CpGs comprises at least the CpGs denoted by [[CG]];
[0326] 20. one or more CpGs within DMR 20 as defined by SEQ ID NO: 5020 denoted by CG, preferably wherein the assay is characterised as having an ROC AUC of at least 0.866, and more preferably wherein the panel of one or more CpGs comprises at least the CpGs denoted by [[CG]];
[0327] 21. one or more CpGs within DMR 21 as defined by SEQ ID NO: 5021 denoted by CG, preferably wherein the assay is characterised as having an ROC AUC of at least 0.863, and more preferably wherein the panel of one or more CpGs comprises at least the CpGs denoted by [[CG]];
[0328] 22. one or more CpGs within DMR 22 as defined by SEQ ID NO: 5022 denoted by CG, preferably wherein the assay is characterised as having an ROC AUC of at least 0.863, and more preferably wherein the panel of one or more CpGs comprises at least the CpGs denoted by [[CG]];
[0329] 23. one or more CpGs within DMR 23 as defined by SEQ ID NO: 5023 denoted by CG, preferably wherein the assay is characterised as having an ROC AUC of at least 0.862, and more preferably wherein the panel of one or more CpGs comprises at least the CpGs denoted by [[CG]];
[0330] 24. one or more CpGs within DMR 24 as defined by SEQ ID NO: 5024 denoted by CG, preferably wherein the assay is characterised as having an ROC AUC of at least 0.861, and more preferably wherein the panel of one or more CpGs comprises at least the CpGs denoted by [[CG]];
[0331] 25. one or more CpGs within DMR 25 as defined by SEQ ID NO: 5025 denoted by CG, preferably wherein the assay is characterised as having an ROC AUC of at least 0.86, and more preferably wherein the panel of one or more CpGs comprises at least the CpGs denoted by [[CG]];
[0332] 26. one or more CpGs within DMR 26 as defined by SEQ ID NO: 5026 denoted by CG, preferably wherein the assay is characterised as having an ROC AUC of at least 0.86, and more preferably wherein the panel of one or more CpGs comprises at least the CpGs denoted by [[CG]];
[0333] 27. one or more CpGs within DMR 27 as defined by SEQ ID NO: 5027 denoted by CG, preferably wherein the assay is characterised as having an ROC AUC of at least 0.86, and more preferably wherein the panel of one or more CpGs comprises at least the CpGs denoted by [[CG]];
[0334] 28. one or more CpGs within DMR 28 as defined by SEQ ID NO: 5028 denoted by CG, preferably wherein the assay is characterised as having an ROC AUC of at least 0.86, and more preferably wherein the panel of one or more CpGs comprises at least the CpGs denoted by [[CG]];
[0335] 29. one or more CpGs within DMR 29 as defined by SEQ ID NO: 5029 denoted by CG, preferably wherein the assay is characterised as having an ROC AUC of at least 0.86, and more preferably wherein the panel of one or more CpGs comprises at least the CpGs denoted by [[CG]];
[0336] 30. one or more CpGs within DMR 30 as defined by SEQ ID NO: 5030 denoted by CG, preferably wherein the assay is characterised as having an ROC AUC of at least 0.859, and more preferably wherein the panel of one or more CpGs comprises at least the CpGs denoted by [[CG]];
[0337] 31. one or more CpGs within DMR 31 as defined by SEQ ID NO: 5031 denoted by CG, preferably wherein the assay is characterised as having an ROC AUC of at least 0.859, and more preferably wherein the panel of one or more CpGs comprises at least the CpGs denoted by [[CG]];
[0338] 32. one or more CpGs within DMR 32 as defined by SEQ ID NO: 5032 denoted by CG, preferably wherein the assay is characterised as having an ROC AUC of at least 0.858, and more preferably wherein the panel of one or more CpGs comprises at least the CpGs denoted by [[CG]];
[0339] 33. one or more CpGs within DMR 33 as defined by SEQ ID NO: 5033 denoted by CG, preferably wherein the assay is characterised as having an ROC AUC of at least 0.858, and more preferably wherein the panel of one or more CpGs comprises at least the CpGs denoted by [[CG]];
[0340] 34. one or more CpGs within DMR 34 as defined by SEQ ID NO: 5034 denoted by CG, preferably wherein the assay is characterised as having an ROC AUC of at least 0.858, and more preferably wherein the panel of one or more CpGs comprises at least the CpGs denoted by [[CG]];
[0341] 35. one or more CpGs within DMR 35 as defined by SEQ ID NO: 5035 denoted by CG, preferably wherein the assay is characterised as having an ROC AUC of at least 0.858, and more preferably wherein the panel of one or more CpGs comprises at least the CpGs denoted by [[CG]];
[0342] 36. one or more CpGs within DMR 36 as defined by SEQ ID NO: 5036 denoted by CG, preferably wherein the assay is characterised as having an ROC AUC of at least 0.858, and more preferably wherein the panel of one or more CpGs comprises at least the CpGs denoted by [[CG]];
[0343] 37. one or more CpGs within DMR 37 as defined by SEQ ID NO: 5037 denoted by CG, preferably wherein the assay is characterised as having an ROC AUC of at least 0.858, and more preferably wherein the panel of one or more CpGs comprises at least the CpGs denoted by [[CG]];
[0344] 38. one or more CpGs within DMR 38 as defined by SEQ ID NO: 5038 denoted by CG, preferably wherein the assay is characterised as having an ROC AUC of at least 0.858, and more preferably wherein the panel of one or more CpGs comprises at least the CpGs denoted by [[CG]];
[0345] 39. one or more CpGs within DMR 39 as defined by SEQ ID NO: 5039 denoted by CG, preferably wherein the assay is characterised as having an ROC AUC of at least 0.858, and more preferably wherein the panel of one or more CpGs comprises at least the CpGs denoted by [[CG]];
[0346] 40. one or more CpGs within DMR 40 as defined by SEQ ID NO: 5040 denoted by CG, preferably wherein the assay is characterised as having an ROC AUC of at least 0.858, and more preferably wherein the panel of one or more CpGs comprises at least the CpGs denoted by [[CG]];
[0347] 41. one or more CpGs within DMR 41 as defined by SEQ ID NO: 5041 denoted by CG, preferably wherein the assay is characterised as having an ROC AUC of at least 0.858, and more preferably wherein the panel of one or more CpGs comprises at least the CpGs denoted by [[CG]];
[0348] 42. one or more CpGs within DMR 42 as defined by SEQ ID NO: 5042 denoted by CG, preferably wherein the assay is characterised as having an ROC AUC of at least 0.858, and more preferably wherein the panel of one or more CpGs comprises at least the CpGs denoted by [[CG]];
[0349] 43. one or more CpGs within DMR 43 as defined by SEQ ID NO: 5043 denoted by CG, preferably wherein the assay is characterised as having an ROC AUC of at least 0.858, and more preferably wherein the panel of one or more CpGs comprises at least the CpGs denoted by [[CG]];
[0350] 44. one or more CpGs within DMR 44 as defined by SEQ ID NO: 5044 denoted by CG, preferably wherein the assay is characterised as having an ROC AUC of at least 0.858, and more preferably wherein the panel of one or more CpGs comprises at least the CpGs denoted by [[CG]];
[0351] 45. one or more CpGs within DMR 45 as defined by SEQ ID NO: 5045 denoted by CG, preferably wherein the assay is characterised as having an ROC AUC of at least 0.858, and more preferably wherein the panel of one or more CpGs comprises at least the CpGs denoted by [[CG]];
[0352] 46. one or more CpGs within DMR 46 as defined by SEQ ID NO: 5046 denoted by CG, preferably wherein the assay is characterised as having an ROC AUC of at least 0.858, and more preferably wherein the panel of one or more CpGs comprises at least the CpGs denoted by [[CG]];
[0353] 47. one or more CpGs within DMR 47 as defined by SEQ ID NO: 5047 denoted by CG, preferably wherein the assay is characterised as having an ROC AUC of at least 0.856, and more preferably wherein the panel of one or more CpGs comprises at least the CpGs denoted by [[CG]];
[0354] 48. one or more CpGs within DMR 48 as defined by SEQ ID NO: 5048 denoted by CG, preferably wherein the assay is characterised as having an ROC AUC of at least 0.855, and more preferably wherein the panel of one or more CpGs comprises at least the CpGs denoted by [[CG]];
[0355] 49. one or more CpGs within DMR 49 as defined by SEQ ID NO: 5049 denoted by CG, preferably wherein the assay is characterised as having an ROC AUC of at least 0.855, and more preferably wherein the panel of one or more CpGs comprises at least the CpGs denoted by [[CG]];
[0356] 50. one or more CpGs within DMR 50 as defined by SEQ ID NO: 5050 denoted by CG, preferably wherein the assay is characterised as having an ROC AUC of at least 0.855, and more preferably wherein the panel of one or more CpGs comprises at least the CpGs denoted by [[CG]];
[0357] 51. one or more CpGs within DMR 51 as defined by SEQ ID NO: 5051 denoted by CG, preferably wherein the assay is characterised as having an ROC AUC of at least 0.852, and more preferably wherein the panel of one or more CpGs comprises at least the CpGs denoted by [[CG]];
[0358] 52. one or more CpGs within DMR 52 as defined by SEQ ID NO: 5052 denoted by CG, preferably wherein the assay is characterised as having an ROC AUC of at least 0.852, and more preferably wherein the panel of one or more CpGs comprises at least the CpGs denoted by [[CG]];
[0359] 53. one or more CpGs within DMR 53 as defined by SEQ ID NO: 5053 denoted by CG, preferably wherein the assay is characterised as having an ROC AUC of at least 0.851, and more preferably wherein the panel of one or more CpGs comprises at least the CpGs denoted by [[CG]];
[0360] 54. one or more CpGs within DMR 54 as defined by SEQ ID NO: 5054 denoted by CG, preferably wherein the assay is characterised as having an ROC AUC of at least 0.851, and more preferably wherein the panel of one or more CpGs comprises at least the CpGs denoted by [[CG]];
[0361] 55. one or more CpGs within DMR 55 as defined by SEQ ID NO: 5055 denoted by CG, preferably wherein the assay is characterised as having an ROC AUC of at least 0.851, and more preferably wherein the panel of one or more CpGs comprises at least the CpGs denoted by [[CG]];
[0362] 56. one or more CpGs within DMR 56 as defined by SEQ ID NO: 5056 denoted by CG, preferably wherein the assay is characterised as having an ROC AUC of at least 0.851, and more preferably wherein the panel of one or more CpGs comprises at least the CpGs denoted by [[CG]];
[0363] 57. one or more CpGs within DMR 57 as defined by SEQ ID NO: 5057 denoted by CG, preferably wherein the assay is characterised as having an ROC AUC of at least 0.851, and more preferably wherein the panel of one or more CpGs comprises at least the CpGs denoted by [[CG]];
[0364] 58. one or more CpGs within DMR 58 as defined by SEQ ID NO: 5058 denoted by CG, preferably wherein the assay is characterised as having an ROC AUC of at least 0.848, and more preferably wherein the panel of one or more CpGs comprises at least the CpGs denoted by [[CG]];
[0365] 59. one or more CpGs within DMR 59 as defined by SEQ ID NO: 5059 denoted by CG, preferably wherein the assay is characterised as having an ROC AUC of at least 0.847, and more preferably wherein the panel of one or more CpGs comprises at least the CpGs denoted by [[CG]];
[0366] 60. one or more CpGs within DMR 60 as defined by SEQ ID NO: 5060 denoted by CG, preferably wherein the assay is characterised as having an ROC AUC of at least 0.847, and more preferably wherein the panel of one or more CpGs comprises at least the CpGs denoted by [[CG]];
[0367] 61. one or more CpGs within DMR 61 as defined by SEQ ID NO: 5061 denoted by CG, preferably wherein the assay is characterised as having an ROC AUC of at least 0.846, and more preferably wherein the panel of one or more CpGs comprises at least the CpGs denoted by [[CG]];
[0368] 62. one or more CpGs within DMR 62 as defined by SEQ ID NO: 5062 denoted by CG, preferably wherein the assay is characterised as having an ROC AUC of at least 0.846, and more preferably wherein the panel of one or more CpGs comprises at least the CpGs denoted by [[CG]];
[0369] 63. one or more CpGs within DMR 63 as defined by SEQ ID NO: 5063 denoted by CG, preferably wherein the assay is characterised as having an ROC AUC of at least 0.845, and more preferably wherein the panel of one or more CpGs comprises at least the CpGs denoted by [[CG]];
[0370] 64. one or more CpGs within DMR 64 as defined by SEQ ID NO: 5064 denoted by CG, preferably wherein the assay is characterised as having an ROC AUC of at least 0.845, and more preferably wherein the panel of one or more CpGs comprises at least the CpGs denoted by [[CG]];
[0371] 65. one or more CpGs within DMR 65 as defined by SEQ ID NO: 5065 denoted by CG, preferably wherein the assay is characterised as having an ROC AUC of at least 0.845, and more preferably wherein the panel of one or more CpGs comprises at least the CpGs denoted by [[CG]];
[0372] 66. one or more CpGs within DMR 66 as defined by SEQ ID NO: 5066 denoted by CG, preferably wherein the assay is characterised as having an ROC AUC of at least 0.845, and more preferably wherein the panel of one or more CpGs comprises at least the CpGs denoted by [[CG]];
[0373] 67. one or more CpGs within DMR 67 as defined by SEQ ID NO: 5067 denoted by CG, preferably wherein the assay is characterised as having an ROC AUC of at least 0.843, and more preferably wherein the panel of one or more CpGs comprises at least the CpGs denoted by [[CG]];
[0374] 68. one or more CpGs within DMR 68 as defined by SEQ ID NO: 5068 denoted by CG, preferably wherein the assay is characterised as having an ROC AUC of at least 0.843, and more preferably wherein the panel of one or more CpGs comprises at least the CpGs denoted by [[CG]];
[0375] 69. one or more CpGs within DMR 69 as defined by SEQ ID NO: 5069 denoted by CG, preferably wherein the assay is characterised as having an ROC AUC of at least 0.84, and more preferably wherein the panel of one or more CpGs comprises at least the CpGs denoted by [[CG]];
[0376] 70. one or more CpGs within DMR 70 as defined by SEQ ID NO: 5070 denoted by CG, preferably wherein the assay is characterised as having an ROC AUC of at least 0.84, and more preferably wherein the panel of one or more CpGs comprises at least the CpGs denoted by [[CG]];
[0377] 71. one or more CpGs within DMR 71 as defined by SEQ ID NO: 5071 denoted by CG, preferably wherein the assay is characterised as having an ROC AUC of at least 0.84, and more preferably wherein the panel of one or more CpGs comprises at least the CpGs denoted by [[CG]];
[0378] 72. one or more CpGs within DMR 72 as defined by SEQ ID NO: 5072 denoted by CG, preferably wherein the assay is characterised as having an ROC AUC of at least 0.839, and more preferably wherein the panel of one or more CpGs comprises at least the CpGs denoted by [[CG]];
[0379] 73. one or more CpGs within DMR 73 as defined by SEQ ID NO: 5073 denoted by CG, preferably wherein the assay is characterised as having an ROC AUC of at least 0.839, and more preferably wherein the panel of one or more CpGs comprises at least the CpGs denoted by [[CG]];
[0380] 74. one or more CpGs within DMR 74 as defined by SEQ ID NO: 5074 denoted by CG, preferably wherein the assay is characterised as having an ROC AUC of at least 0.839, and more preferably wherein the panel of one or more CpGs comprises at least the CpGs denoted by [[CG]];
[0381] 75. one or more CpGs within DMR 75 as defined by SEQ ID NO: 5075 denoted by CG, preferably wherein the assay is characterised as having an ROC AUC of at least 0.839, and more preferably wherein the panel of one or more CpGs comprises at least the CpGs denoted by [[CG]];
[0382] 76. one or more CpGs within DMR 76 as defined by SEQ ID NO: 5076 denoted by CG, preferably wherein the assay is characterised as having an ROC AUC of at least 0.839, and more preferably wherein the panel of one or more CpGs comprises at least the CpGs denoted by [[CG]];
[0383] 77. one or more CpGs within DMR 77 as defined by SEQ ID NO: 5077 denoted by CG, preferably wherein the assay is characterised as having an ROC AUC of at least 0.839, and more preferably wherein the panel of one or more CpGs comprises at least the CpGs denoted by [[CG]];
[0384] 78. one or more CpGs within DMR 78 as defined by SEQ ID NO: 5078 denoted by CG, preferably wherein the assay is characterised as having an ROC AUC of at least 0.838, and more preferably wherein the panel of one or more CpGs comprises at least the CpGs denoted by [[CG]];
[0385] 79. one or more CpGs within DMR 79 as defined by SEQ ID NO: 5079 denoted by CG, preferably wherein the assay is characterised as having an ROC AUC of at least 0.838, and more preferably wherein the panel of one or more CpGs comprises at least the CpGs denoted by [[CG]];
[0386] 80. one or more CpGs within DMR 80 as defined by SEQ ID NO: 5080 denoted by CG, preferably wherein the assay is characterised as having an ROC AUC of at least 0.838, and more preferably wherein the panel of one or more CpGs comprises at least the CpGs denoted by [[CG]];
[0387] 81. one or more CpGs within DMR 81 as defined by SEQ ID NO: 5081 denoted by CG, preferably wherein the assay is characterised as having an ROC AUC of at least 0.838, and more preferably wherein the panel of one or more CpGs comprises at least the CpGs denoted by [[CG]];
[0388] 82. one or more CpGs within DMR 82 as defined by SEQ ID NO: 5082 denoted by CG, preferably wherein the assay is characterised as having an ROC AUC of at least 0.837, and more preferably wherein the panel of one or more CpGs comprises at least the CpGs denoted by [[CG]];
[0389] 83. one or more CpGs within DMR 83 as defined by SEQ ID NO: 5083 denoted by CG, preferably wherein the assay is characterised as having an ROC AUC of at least 0.837, and more preferably wherein the panel of one or more CpGs comprises at least the CpGs denoted by [[CG]];
[0390] 84. one or more CpGs within DMR 84 as defined by SEQ ID NO: 5084 denoted by CG, preferably wherein the assay is characterised as having an ROC AUC of at least 0.837, and more preferably wherein the panel of one or more CpGs comprises at least the CpGs denoted by [[CG]];
[0391] 85. one or more CpGs within DMR 85 as defined by SEQ ID NO: 5085 denoted by CG, preferably wherein the assay is characterised as having an ROC AUC of at least 0.837, and more preferably wherein the panel of one or more CpGs comprises at least the CpGs denoted by [[CG]];
[0392] 86. one or more CpGs within DMR 86 as defined by SEQ ID NO: 5086 denoted by CG, preferably wherein the assay is characterised as having an ROC AUC of at least 0.837, and more preferably wherein the panel of one or more CpGs comprises at least the CpGs denoted by [[CG]];
[0393] 87. one or more CpGs within DMR 87 as defined by SEQ ID NO: 5087 denoted by CG, preferably wherein the assay is characterised as having an ROC AUC of at least 0.837, and more preferably wherein the panel of one or more CpGs comprises at least the CpGs denoted by [[CG]];
[0394] 88. one or more CpGs within DMR 88 as defined by SEQ ID NO: 5088 denoted by CG, preferably wherein the assay is characterised as having an ROC AUC of at least 0.837, and more preferably wherein the panel of one or more CpGs comprises at least the CpGs denoted by [[CG]];
[0395] 89. one or more CpGs within DMR 89 as defined by SEQ ID NO: 5089 denoted by CG, preferably wherein the assay is characterised as having an ROC AUC of at least 0.836, and more preferably wherein the panel of one or more CpGs comprises at least the CpGs denoted by [[CG]];
[0396] 90. one or more CpGs within DMR 90 as defined by SEQ ID NO: 5090 denoted by CG, preferably wherein the assay is characterised as having an ROC AUC of at least 0.836, and more preferably wherein the panel of one or more CpGs comprises at least the CpGs denoted by [[CG]];
[0397] 91. one or more CpGs within DMR 91 as defined by SEQ ID NO: 5091 denoted by CG, preferably wherein the assay is characterised as having an ROC AUC of at least 0.836, and more preferably wherein the panel of one or more CpGs comprises at least the CpGs denoted by [[CG]];
[0398] 92. one or more CpGs within DMR 92 as defined by SEQ ID NO: 5092 denoted by CG, preferably wherein the assay is characterised as having an ROC AUC of at least 0.836, and more preferably wherein the panel of one or more CpGs comprises at least the CpGs denoted by [[CG]];
[0399] 93. one or more CpGs within DMR 93 as defined by SEQ ID NO: 5093 denoted by CG, preferably wherein the assay is characterised as having an ROC AUC of at least 0.835, and more preferably wherein the panel of one or more CpGs comprises at least the CpGs denoted by [[CG]];
[0400] 94. one or more CpGs within DMR 94 as defined by SEQ ID NO: 5094 denoted by CG, preferably wherein the assay is characterised as having an ROC AUC of at least 0.835, and more preferably wherein the panel of one or more CpGs comprises at least the CpGs denoted by [[CG]];
[0401] 95. one or more CpGs within DMR 95 as defined by SEQ ID NO: 5095 denoted by CG, preferably wherein the assay is characterised as having an ROC AUC of at least 0.834, and more preferably wherein the panel of one or more CpGs comprises at least the CpGs denoted by [[CG]];
[0402] 96. one or more CpGs within DMR 96 as defined by SEQ ID NO: 5096 denoted by CG, preferably wherein the assay is characterised as having an ROC AUC of at least 0.834, and more preferably wherein the panel of one or more CpGs comprises at least the CpGs denoted by [[CG]];
[0403] 97. one or more CpGs within DMR 97 as defined by SEQ ID NO: 5097 denoted by CG, preferably wherein the assay is characterised as having an ROC AUC of at least 0.834, and more preferably wherein the panel of one or more CpGs comprises at least the CpGs denoted by [[CG]];
[0404] 98. one or more CpGs within DMR 98 as defined by SEQ ID NO: 5098 denoted by CG, preferably wherein the assay is characterised as having an ROC AUC of at least 0.834, and more preferably wherein the panel of one or more CpGs comprises at least the CpGs denoted by [[CG]];
[0405] 99. one or more CpGs within DMR 99 as defined by SEQ ID NO: 5099 denoted by CG, preferably wherein the assay is characterised as having an ROC AUC of at least 0.834, and more preferably wherein the panel of one or more CpGs comprises at least the CpGs denoted by [[CG]];
[0406] 100. one or more CpGs within DMR 100 as defined by SEQ ID NO: 5100 denoted by CG, preferably wherein the assay is characterised as having an ROC AUC of at least 0.834, and more preferably wherein the panel of one or more CpGs comprises at least the CpGs denoted by [[CG]];
[0407] 101. one or more CpGs within DMR 101 as defined by SEQ ID NO: 5101 denoted by CG, preferably wherein the assay is characterised as having an ROC AUC of at least 0.834, and more preferably wherein the panel of one or more CpGs comprises at least the CpGs denoted by [[CG]];
[0408] 102. one or more CpGs within DMR 102 as defined by SEQ ID NO: 5102 denoted by CG, preferably wherein the assay is characterised as having an ROC AUC of at least 0.834, and more preferably wherein the panel of one or more CpGs comprises at least the CpGs denoted by [[CG]];
[0409] 103. one or more CpGs within DMR 103 as defined by SEQ ID NO: 5103 denoted by CG, preferably wherein the assay is characterised as having an ROC AUC of at least 0.834, and more preferably wherein the panel of one or more CpGs comprises at least the CpGs denoted by [[CG]];
[0410] 104. one or more CpGs within DMR 104 as defined by SEQ ID NO: 5104 denoted by CG, preferably wherein the assay is characterised as having an ROC AUC of at least 0.834, and more preferably wherein the panel of one or more CpGs comprises at least the CpGs denoted by [[CG]];
[0411] 105. one or more CpGs within DMR 105 as defined by SEQ ID NO: 5105 denoted by CG, preferably wherein the assay is characterised as having an ROC AUC of at least 0.834, and more preferably wherein the panel of one or more CpGs comprises at least the CpGs denoted by [[CG]];
[0412] 106. one or more CpGs within DMR 106 as defined by SEQ ID NO: 5106 denoted by CG, preferably wherein the assay is characterised as having an ROC AUC of at least 0.834, and more preferably wherein the panel of one or more CpGs comprises at least the CpGs denoted by [[CG]];
[0413] 107. one or more CpGs within DMR 107 as defined by SEQ ID NO: 5107 denoted by CG, preferably wherein the assay is characterised as having an ROC AUC of at least 0.834, and more preferably wherein the panel of one or more CpGs comprises at least the CpGs denoted by [[CG]];
[0414] 108. one or more CpGs within DMR 108 as defined by SEQ ID NO: 5108 denoted by CG, preferably wherein the assay is characterised as having an ROC AUC of at least 0.833, and more preferably wherein the panel of one or more CpGs comprises at least the CpGs denoted by [[CG]];
[0415] 109. one or more CpGs within DMR 109 as defined by SEQ ID NO: 5109 denoted by CG, preferably wherein the assay is characterised as having an ROC AUC of at least 0.833, and more preferably wherein the panel of one or more CpGs comprises at least the CpGs denoted by [[CG]];
[0416] 110. one or more CpGs within DMR 110 as defined by SEQ ID NO: 5110 denoted by CG, preferably wherein the assay is characterised as having an ROC AUC of at least 0.833, and more preferably wherein the panel of one or more CpGs comprises at least the CpGs denoted by [[CG]];
[0417] 111. one or more CpGs within DMR 111 as defined by SEQ ID NO: 5111 denoted by CG, preferably wherein the assay is characterised as having an ROC AUC of at least 0.833, and more preferably wherein the panel of one or more CpGs comprises at least the CpGs denoted by [[CG]];
[0418] 112. one or more CpGs within DMR 112 as defined by SEQ ID NO: 5112 denoted by CG, preferably wherein the assay is characterised as having an ROC AUC of at least 0.833, and more preferably wherein the panel of one or more CpGs comprises at least the CpGs denoted by [[CG]];
[0419] 113. one or more CpGs within DMR 113 as defined by SEQ ID NO: 5113 denoted by CG, preferably wherein the assay is characterised as having an ROC AUC of at least 0.833, and more preferably wherein the panel of one or more CpGs comprises at least the CpGs denoted by [[CG]];
[0420] 114. one or more CpGs within DMR 114 as defined by SEQ ID NO: 5114 denoted by CG, preferably wherein the assay is characterised as having an ROC AUC of at least 0.833, and more preferably wherein the panel of one or more CpGs comprises at least the CpGs denoted by [[CG]];
[0421] 115. one or more CpGs within DMR 115 as defined by SEQ ID NO: 5115 denoted by CG, preferably wherein the assay is characterised as having an ROC AUC of at least 0.833, and more preferably wherein the panel of one or more CpGs comprises at least the CpGs denoted by [[CG]];
[0422] 116. one or more CpGs within DMR 116 as defined by SEQ ID NO: 5116 denoted by CG, preferably wherein the assay is characterised as having an ROC AUC of at least 0.831, and more preferably wherein the panel of one or more CpGs comprises at least the CpGs denoted by [[CG]];
[0423] 117. one or more CpGs within DMR 117 as defined by SEQ ID NO: 5117 denoted by CG, preferably wherein the assay is characterised as having an ROC AUC of at least 0.831, and more preferably wherein the panel of one or more CpGs comprises at least the CpGs denoted by [[CG]];
[0424] 118. one or more CpGs within DMR 118 as defined by SEQ ID NO: 5118 denoted by CG, preferably wherein the assay is characterised as having an ROC AUC of at least 0.83, and more preferably wherein the panel of one or more CpGs comprises at least the CpGs denoted by [[CG]];
[0425] 119. one or more CpGs within DMR 119 as defined by SEQ ID NO: 5119 denoted by CG, preferably wherein the assay is characterised as having an ROC AUC of at least 0.83, and more preferably wherein the panel of one or more CpGs comprises at least the CpGs denoted by [[CG]];
[0426] 120. one or more CpGs within DMR 120 as defined by SEQ ID NO: 5120 denoted by CG, preferably wherein the assay is characterised as having an ROC AUC of at least 0.83, and more preferably wherein the panel of one or more CpGs comprises at least the CpGs denoted by [[CG]];
[0427] 121. one or more CpGs within DMR 121 as defined by SEQ ID NO: 5121 denoted by CG, preferably wherein the assay is characterised as having an ROC AUC of at least 0.83, and more preferably wherein the panel of one or more CpGs comprises at least the CpGs denoted by [[CG]];
[0428] 122. one or more CpGs within DMR 122 as defined by SEQ ID NO: 5122 denoted by CG, preferably wherein the assay is characterised as having an ROC AUC of at least 0.83, and more preferably wherein the panel of one or more CpGs comprises at least the CpGs denoted by [[CG]];
[0429] 123. one or more CpGs within DMR 123 as defined by SEQ ID NO: 5123 denoted by CG, preferably wherein the assay is characterised as having an ROC AUC of at least 0.83, and more preferably wherein the panel of one or more CpGs comprises at least the CpGs denoted by [[CG]];
[0430] 124. one or more CpGs within DMR 124 as defined by SEQ ID NO: 5124 denoted by CG, preferably wherein the assay is characterised as having an ROC AUC of at least 0.83, and more preferably wherein the panel of one or more CpGs comprises at least the CpGs denoted by [[CG]];
[0431] 125. one or more CpGs within DMR 125 as defined by SEQ ID NO: 5125 denoted by CG, preferably wherein the assay is characterised as having an ROC AUC of at least 0.83, and more preferably wherein the panel of one or more CpGs comprises at least the CpGs denoted by [[CG]];
[0432] 126. one or more CpGs within DMR 126 as defined by SEQ ID NO: 5126 denoted by CG, preferably wherein the assay is characterised as having an ROC AUC of at least 0.83, and more preferably wherein the panel of one or more CpGs comprises at least the CpGs denoted by [[CG]];
[0433] 127. one or more CpGs within DMR 127 as defined by SEQ ID NO: 5127 denoted by CG, preferably wherein the assay is characterised as having an ROC AUC of at least 0.83, and more preferably wherein the panel of one or more CpGs comprises at least the CpGs denoted by [[CG]];
[0434] 128. one or more CpGs within DMR 128 as defined by SEQ ID NO: 5128 denoted by CG, preferably wherein the assay is characterised as having an ROC AUC of at least 0.829, and more preferably wherein the panel of one or more CpGs comprises at least the CpGs denoted by [[CG]];
[0435] 129. one or more CpGs within DMR 129 as defined by SEQ ID NO: 5129 denoted by CG, preferably wherein the assay is characterised as having an ROC AUC of at least 0.829, and more preferably wherein the panel of one or more CpGs comprises at least the CpGs denoted by [[CG]];
[0436] 130. one or more CpGs within DMR 130 as defined by SEQ ID NO: 5130 denoted by CG, preferably wherein the assay is characterised as having an ROC AUC of at least 0.829, and more preferably wherein the panel of one or more CpGs comprises at least the CpGs denoted by [[CG]];
[0437] 131. one or more CpGs within DMR 131 as defined by SEQ ID NO: 5131 denoted by CG, preferably wherein the assay is characterised as having an ROC AUC of at least 0.829, and more preferably wherein the panel of one or more CpGs comprises at least the CpGs denoted by [[CG]];
[0438] 132. one or more CpGs within DMR 132 as defined by SEQ ID NO: 5132 denoted by CG, preferably wherein the assay is characterised as having an ROC AUC of at least 0.828, and more preferably wherein the panel of one or more CpGs comprises at least the CpGs denoted by [[CG]];
[0439] 133. one or more CpGs within DMR 133 as defined by SEQ ID NO: 5133 denoted by CG, preferably wherein the assay is characterised as having an ROC AUC of at least 0.828, and more preferably wherein the panel of one or more CpGs comprises at least the CpGs denoted by [[CG]];
[0440] 134. one or more CpGs within DMR 134 as defined by SEQ ID NO: 5134 denoted by CG, preferably wherein the assay is characterised as having an ROC AUC of at least 0.828, and more preferably wherein the panel of one or more CpGs comprises at least the CpGs denoted by [[CG]];
[0441] 135. one or more CpGs within DMR 135 as defined by SEQ ID NO: 5135 denoted by CG, preferably wherein the assay is characterised as having an ROC AUC of at least 0.828, and more preferably wherein the panel of one or more CpGs comprises at least the CpGs denoted by [[CG]];
[0442] 136. one or more CpGs within DMR 136 as defined by SEQ ID NO: 5136 denoted by CG, preferably wherein the assay is characterised as having an ROC AUC of at least 0.828, and more preferably wherein the panel of one or more CpGs comprises at least the CpGs denoted by [[CG]];
[0443] 137. one or more CpGs within DMR 137 as defined by SEQ ID NO: 5137 denoted by CG, preferably wherein the assay is characterised as having an ROC AUC of at least 0.827, and more preferably wherein the panel of one or more CpGs comprises at least the CpGs denoted by [[CG]];
[0444] 138. one or more CpGs within DMR 138 as defined by SEQ ID NO: 5138 denoted by CG, preferably wherein the assay is characterised as having an ROC AUC of at least 0.827, and more preferably wherein the panel of one or more CpGs comprises at least the CpGs denoted by [[CG]];
[0445] 139. one or more CpGs within DMR 139 as defined by SEQ ID NO: 5139 denoted by CG, preferably wherein the assay is characterised as having an ROC AUC of at least 0.827, and more preferably wherein the panel of one or more CpGs comprises at least the CpGs denoted by [[CG]];
[0446] 140. one or more CpGs within DMR 140 as defined by SEQ ID NO: 5140 denoted by CG, preferably wherein the assay is characterised as having an ROC AUC of at least 0.826, and more preferably wherein the panel of one or more CpGs comprises at least the CpGs denoted by [[CG]];
[0447] 141. one or more CpGs within DMR 141 as defined by SEQ ID NO: 5141 denoted by CG, preferably wherein the assay is characterised as having an ROC AUC of at least 0.826, and more preferably wherein the panel of one or more CpGs comprises at least the CpGs denoted by [[CG]];
[0448] 142. one or more CpGs within DMR 142 as defined by SEQ ID NO: 5142 denoted by CG, preferably wherein the assay is characterised as having an ROC AUC of at least 0.826, and more preferably wherein the panel of one or more CpGs comprises at least the CpGs denoted by [[CG]];
[0449] 143. one or more CpGs within DMR 143 as defined by SEQ ID NO: 5143 denoted by CG, preferably wherein the assay is characterised as having an ROC AUC of at least 0.826, and more preferably wherein the panel of one or more CpGs comprises at least the CpGs denoted by [[CG]];
[0450] 144. one or more CpGs within DMR 144 as defined by SEQ ID NO: 5144 denoted by CG, preferably wherein the assay is characterised as having an ROC AUC of at least 0.826, and more preferably wherein the panel of one or more CpGs comprises at least the CpGs denoted by [[CG]];
[0451] 145. one or more CpGs within DMR 145 as defined by SEQ ID NO: 5145 denoted by CG, preferably wherein the assay is characterised as having an ROC AUC of at least 0.826, and more preferably wherein the panel of one or more CpGs comprises at least the CpGs denoted by [[CG]];
[0452] 146. one or more CpGs within DMR 146 as defined by SEQ ID NO: 5146 denoted by CG, preferably wherein the assay is characterised as having an ROC AUC of at least 0.826, and more preferably wherein the panel of one or more CpGs comprises at least the CpGs denoted by [[CG]];
[0453] 147. one or more CpGs within DMR 147 as defined by SEQ ID NO: 5147 denoted by CG, preferably wherein the assay is characterised as having an ROC AUC of at least 0.825, and more preferably wherein the panel of one or more CpGs comprises at least the CpGs denoted by [[CG]];
[0454] 148. one or more CpGs within DMR 148 as defined by SEQ ID NO: 5148 denoted by CG, preferably wherein the assay is characterised as having an ROC AUC of at least 0.825, and more preferably wherein the panel of one or more CpGs comprises at least the CpGs denoted by [[CG]];
[0455] 149. one or more CpGs within DMR 149 as defined by SEQ ID NO: 5149 denoted by CG, preferably wherein the assay is characterised as having an ROC AUC of at least 0.825, and more preferably wherein the panel of one or more CpGs comprises at least the CpGs denoted by [[CG]];
[0456] 150. one or more CpGs within DMR 150 as defined by SEQ ID NO: 5150 denoted by CG, preferably wherein the assay is characterised as having an ROC AUC of at least 0.825, and more preferably wherein the panel of one or more CpGs comprises at least the CpGs denoted by [[CG]];
[0457] 151. one or more CpGs within DMR 151 as defined by SEQ ID NO: 5151 denoted by CG, preferably wherein the assay is characterised as having an ROC AUC of at least 0.825, and more preferably wherein the panel of one or more CpGs comprises at least the CpGs denoted by [[CG]];
[0458] 152. one or more CpGs within DMR 152 as defined by SEQ ID NO: 5152 denoted by CG, preferably wherein the assay is characterised as having an ROC AUC of at least 0.825, and more preferably wherein the panel of one or more CpGs comprises at least the CpGs denoted by [[CG]];
[0459] 153. one or more CpGs within DMR 153 as defined by SEQ ID NO: 5153 denoted by CG, preferably wherein the assay is characterised as having an ROC AUC of at least 0.825, and more preferably wherein the panel of one or more CpGs comprises at least the CpGs denoted by [[CG]];
[0460] 154. one or more CpGs within DMR 154 as defined by SEQ ID NO: 5154 denoted by CG, preferably wherein the assay is characterised as having an ROC AUC of at least 0.825, and more preferably wherein the panel of one or more CpGs comprises at least the CpGs denoted by [[CG]];
[0461] 155. one or more CpGs within DMR 155 as defined by SEQ ID NO: 5155 denoted by CG, preferably wherein the assay is characterised as having an ROC AUC of at least 0.825, and more preferably wherein the panel of one or more CpGs comprises at least the CpGs denoted by [[CG]];
[0462] 156. one or more CpGs within DMR 156 as defined by SEQ ID NO: 5156 denoted by CG, preferably wherein the assay is characterised as having an ROC AUC of at least 0.825, and more preferably wherein the panel of one or more CpGs comprises at least the CpGs denoted by [[CG]];
[0463] 157. one or more CpGs within DMR 157 as defined by SEQ ID NO: 5157 denoted by CG, preferably wherein the assay is characterised as having an ROC AUC of at least 0.825, and more preferably wherein the panel of one or more CpGs comprises at least the CpGs denoted by [[CG]];
[0464] 158. one or more CpGs within DMR 158 as defined by SEQ ID NO: 5158 denoted by CG, preferably wherein the assay is characterised as having an ROC AUC of at least 0.825, and more preferably wherein the panel of one or more CpGs comprises at least the CpGs denoted by [[CG]];
[0465] 159. one or more CpGs within DMR 159 as defined by SEQ ID NO: 5159 denoted by CG, preferably wherein the assay is characterised as having an ROC AUC of at least 0.825, and more preferably wherein the panel of one or more CpGs comprises at least the CpGs denoted by [[CG]];
[0466] 160. one or more CpGs within DMR 160 as defined by SEQ ID NO: 5160 denoted by CG, preferably wherein the assay is characterised as having an ROC AUC of at least 0.825, and more preferably wherein the panel of one or more CpGs comprises at least the CpGs denoted by [[CG]];
[0467] 161. one or more CpGs within DMR 161 as defined by SEQ ID NO: 5161 denoted by CG, preferably wherein the assay is characterised as having an ROC AUC of at least 0.825, and more preferably wherein the panel of one or more CpGs comprises at least the CpGs denoted by [[CG]];
[0468] 162. one or more CpGs within DMR 162 as defined by SEQ ID NO: 5162 denoted by CG, preferably wherein the assay is characterised as having an ROC AUC of at least 0.825, and more preferably wherein the panel of one or more CpGs comprises at least the CpGs denoted by [[CG]];
[0469] 163. one or more CpGs within DMR 163 as defined by SEQ ID NO: 5163 denoted by CG, preferably wherein the assay is characterised as having an ROC AUC of at least 0.825, and more preferably wherein the panel of one or more CpGs comprises at least the CpGs denoted by [[CG]];
[0470] 164. one or more CpGs within DMR 164 as defined by SEQ ID NO: 5164 denoted by CG, preferably wherein the assay is characterised as having an ROC AUC of at least 0.824, and more preferably wherein the panel of one or more CpGs comprises at least the CpGs denoted by [[CG]];
[0471] 165. one or more CpGs within DMR 165 as defined by SEQ ID NO: 5165 denoted by CG, preferably wherein the assay is characterised as having an ROC AUC of at least 0.823, and more preferably wherein the panel of one or more CpGs comprises at least the CpGs denoted by [[CG]];
[0472] 166. one or more CpGs within DMR 166 as defined by SEQ ID NO: 5166 denoted by CG, preferably wherein the assay is characterised as having an ROC AUC of at least 0.823, and more preferably wherein the panel of one or more CpGs comprises at least the CpGs denoted by [[CG]];
[0473] 167. one or more CpGs within DMR 167 as defined by SEQ ID NO: 5167 denoted by CG, preferably wherein the assay is characterised as having an ROC AUC of at least 0.823, and more preferably wherein the panel of one or more CpGs comprises at least the CpGs denoted by [[CG]];
[0474] 168. one or more CpGs within DMR 168 as defined by SEQ ID NO: 5168 denoted by CG, preferably wherein the assay is characterised as having an ROC AUC of at least 0.823, and more preferably wherein the panel of one or more CpGs comprises at least the CpGs denoted by [[CG]];
[0475] 169. one or more CpGs within DMR 169 as defined by SEQ ID NO: 5169 denoted by CG, preferably wherein the assay is characterised as having an ROC AUC of at least 0.823, and more preferably wherein the panel of one or more CpGs comprises at least the CpGs denoted by [[CG]];
[0476] 170. one or more CpGs within DMR 170 as defined by SEQ ID NO: 5170 denoted by CG, preferably wherein the assay is characterised as having an ROC AUC of at least 0.823, and more preferably wherein the panel of one or more CpGs comprises at least the CpGs denoted by [[CG]];
[0477] 171. one or more CpGs within DMR 171 as defined by SEQ ID NO: 5171 denoted by CG, preferably wherein the assay is characterised as having an ROC AUC of at least 0.823, and more preferably wherein the panel of one or more CpGs comprises at least the CpGs denoted by [[CG]];
[0478] 172. one or more CpGs within DMR 172 as defined by SEQ ID NO: 5172 denoted by CG, preferably wherein the assay is characterised as having an ROC AUC of at least 0.823, and more preferably wherein the panel of one or more CpGs comprises at least the CpGs denoted by [[CG]];
[0479] 173. one or more CpGs within DMR 173 as defined by SEQ ID NO: 5173 denoted by CG, preferably wherein the assay is characterised as having an ROC AUC of at least 0.823, and more preferably wherein the panel of one or more CpGs comprises at least the CpGs denoted by [[CG]];
[0480] 174. one or more CpGs within DMR 174 as defined by SEQ ID NO: 5174 denoted by CG, preferably wherein the assay is characterised as having an ROC AUC of at least 0.822, and more preferably wherein the panel of one or more CpGs comprises at least the CpGs denoted by [[CG]];
[0481] 175. one or more CpGs within DMR 175 as defined by SEQ ID NO: 5175 denoted by CG, preferably wherein the assay is characterised as having an ROC AUC of at least 0.822, and more preferably wherein the panel of one or more CpGs comprises at least the CpGs denoted by [[CG]];
[0482] 176. one or more CpGs within DMR 176 as defined by SEQ ID NO: 5176 denoted by CG, preferably wherein the assay is characterised as having an ROC AUC of at least 0.822, and more preferably wherein the panel of one or more CpGs comprises at least the CpGs denoted by [[CG]];
[0483] 177. one or more CpGs within DMR 177 as defined by SEQ ID NO: 5177 denoted by CG, preferably wherein the assay is characterised as having an ROC AUC of at least 0.822, and more preferably wherein the panel of one or more CpGs comprises at least the CpGs denoted by [[CG]];
[0484] 178. one or more CpGs within DMR 178 as defined by SEQ ID NO: 5178 denoted by CG, preferably wherein the assay is characterised as having an ROC AUC of at least 0.822, and more preferably wherein the panel of one or more CpGs comprises at least the CpGs denoted by [[CG]];
[0485] 179. one or more CpGs within DMR 179 as defined by SEQ ID NO: 5179 denoted by CG, preferably wherein the assay is characterised as having an ROC AUC of at least 0.822, and more preferably wherein the panel of one or more CpGs comprises at least the CpGs denoted by [[CG]];
[0486] 180. one or more CpGs within DMR 180 as defined by SEQ ID NO: 5180 denoted by CG, preferably wherein the assay is characterised as having an ROC AUC of at least 0.821, and more preferably wherein the panel of one or more CpGs comprises at least the CpGs denoted by [[CG]];
[0487] 181. one or more CpGs within DMR 181 as defined by SEQ ID NO: 5181 denoted by CG, preferably wherein the assay is characterised as having an ROC AUC of at least 0.821, and more preferably wherein the panel of one or more CpGs comprises at least the CpGs denoted by [[CG]];
[0488] 182. one or more CpGs within DMR 182 as defined by SEQ ID NO: 5182 denoted by CG, preferably wherein the assay is characterised as having an ROC AUC of at least 0.821, and more preferably wherein the panel of one or more CpGs comprises at least the CpGs denoted by [[CG]];
[0489] 183. one or more CpGs within DMR 183 as defined by SEQ ID NO: 5183 denoted by CG, preferably wherein the assay is characterised as having an ROC AUC of at least 0.821, and more preferably wherein the panel of one or more CpGs comprises at least the CpGs denoted by [[CG]];
[0490] 184. one or more CpGs within DMR 184 as defined by SEQ ID NO: 5184 denoted by CG, preferably wherein the assay is characterised as having an ROC AUC of at least 0.821, and more preferably wherein the panel of one or more CpGs comprises at least the CpGs denoted by [[CG]];
[0491] 185. one or more CpGs within DMR 185 as defined by SEQ ID NO: 5185 denoted by CG, preferably wherein the assay is characterised as having an ROC AUC of at least 0.821, and more preferably wherein the panel of one or more CpGs comprises at least the CpGs denoted by [[CG]];
[0492] 186. one or more CpGs within DMR 186 as defined by SEQ ID NO: 5186 denoted by CG, preferably wherein the assay is characterised as having an ROC AUC of at least 0.821, and more preferably wherein the panel of one or more CpGs comprises at least the CpGs denoted by [[CG]];
[0493] 187. one or more CpGs within DMR 187 as defined by SEQ ID NO: 5187 denoted by CG, preferably wherein the assay is characterised as having an ROC AUC of at least 0.821, and more preferably wherein the panel of one or more CpGs comprises at least the CpGs denoted by [[CG]];
[0494] 188. one or more CpGs within DMR 188 as defined by SEQ ID NO: 5188 denoted by CG, preferably wherein the assay is characterised as having an ROC AUC of at least 0.821, and more preferably wherein the panel of one or more CpGs comprises at least the CpGs denoted by [[CG]];
[0495] 189. one or more CpGs within DMR 189 as defined by SEQ ID NO: 5189 denoted by CG, preferably wherein the assay is characterised as having an ROC AUC of at least 0.821, and more preferably wherein the panel of one or more CpGs comprises at least the CpGs denoted by [[CG]];
[0496] 190. one or more CpGs within DMR 190 as defined by SEQ ID NO: 5190 denoted by CG, preferably wherein the assay is characterised as having an ROC AUC of at least 0.82, and more preferably wherein the panel of one or more CpGs comprises at least the CpGs denoted by [[CG]];
[0497] 191. one or more CpGs within DMR 191 as defined by SEQ ID NO: 5191 denoted by CG, preferably wherein the assay is characterised as having an ROC AUC of at least 0.82, and more preferably wherein the panel of one or more CpGs comprises at least the CpGs denoted by [[CG]];
[0498] 192. one or more CpGs within DMR 192 as defined by SEQ ID NO: 5192 denoted by CG, preferably wherein the assay is characterised as having an ROC AUC of at least 0.82, and more preferably wherein the panel of one or more CpGs comprises at least the CpGs denoted by [[CG]];
[0499] 193. one or more CpGs within DMR 193 as defined by SEQ ID NO: 5193 denoted by CG, preferably wherein the assay is characterised as having an ROC AUC of at least 0.82, and more preferably wherein the panel of one or more CpGs comprises at least the CpGs denoted by [[CG]];
[0500] 194. one or more CpGs within DMR 194 as defined by SEQ ID NO: 5194 denoted by CG, preferably wherein the assay is characterised as having an ROC AUC of at least 0.819, and more preferably wherein the panel of one or more CpGs comprises at least the CpGs denoted by [[CG]];
[0501] 195. one or more CpGs within DMR 195 as defined by SEQ ID NO: 5195 denoted by CG, preferably wherein the assay is characterised as having an ROC AUC of at least 0.819, and more preferably wherein the panel of one or more CpGs comprises at least the CpGs denoted by [[CG]];
[0502] 196. one or more CpGs within DMR 196 as defined by SEQ ID NO: 5196 denoted by CG, preferably wherein the assay is characterised as having an ROC AUC of at least 0.819, and more preferably wherein the panel of one or more CpGs comprises at least the CpGs denoted by [[CG]];
[0503] 197. one or more CpGs within DMR 197 as defined by SEQ ID NO: 5197 denoted by CG, preferably wherein the assay is characterised as having an ROC AUC of at least 0.819, and more preferably wherein the panel of one or more CpGs comprises at least the CpGs denoted by [[CG]];
[0504] 198. one or more CpGs within DMR 198 as defined by SEQ ID NO: 5198 denoted by CG, preferably wherein the assay is characterised as having an ROC AUC of at least 0.819, and more preferably wherein the panel of one or more CpGs comprises at least the CpGs denoted by [[CG]];
[0505] 199. one or more CpGs within DMR 199 as defined by SEQ ID NO: 5199 denoted by CG, preferably wherein the assay is characterised as having an ROC AUC of at least 0.819, and more preferably wherein the panel of one or more CpGs comprises at least the CpGs denoted by [[CG]];
[0506] 200. one or more CpGs within DMR 200 as defined by SEQ ID NO: 5200 denoted by CG, preferably wherein the assay is characterised as having an ROC AUC of at least 0.819, and more preferably wherein the panel of one or more CpGs comprises at least the CpGs denoted by [[CG]];
[0507] 201. one or more CpGs within DMR 201 as defined by SEQ ID NO: 5201 denoted by CG, preferably wherein the assay is characterised as having an ROC AUC of at least 0.819, and more preferably wherein the panel of one or more CpGs comprises at least the CpGs denoted by [[CG]];
[0508] 202. one or more CpGs within DMR 202 as defined by SEQ ID NO: 5202 denoted by CG, preferably wherein the assay is characterised as having an ROC AUC of at least 0.819, and more preferably wherein the panel of one or more CpGs comprises at least the CpGs denoted by [[CG]];
[0509] 203. one or more CpGs within DMR 203 as defined by SEQ ID NO: 5203 denoted by CG, preferably wherein the assay is characterised as having an ROC AUC of at least 0.819, and more preferably wherein the panel of one or more CpGs comprises at least the CpGs denoted by [[CG]];
[0510] 204. one or more CpGs within DMR 204 as defined by SEQ ID NO: 5204 denoted by CG, preferably wherein the assay is characterised as having an ROC AUC of at least 0.818, and more preferably wherein the panel of one or more CpGs comprises at least the CpGs denoted by [[CG]];
[0511] 205. one or more CpGs within DMR 205 as defined by SEQ ID NO: 5205 denoted by CG, preferably wherein the assay is characterised as having an ROC AUC of at least 0.818, and more preferably wherein the panel of one or more CpGs comprises at least the CpGs denoted by [[CG]];
[0512] 206. one or more CpGs within DMR 206 as defined by SEQ ID NO: 5206 denoted by CG, preferably wherein the assay is characterised as having an ROC AUC of at least 0.818, and more preferably wherein the panel of one or more CpGs comprises at least the CpGs denoted by [[CG]];
[0513] 207. one or more CpGs within DMR 207 as defined by SEQ ID NO: 5207 denoted by CG, preferably wherein the assay is characterised as having an ROC AUC of at least 0.818, and more preferably wherein the panel of one or more CpGs comprises at least the CpGs denoted by [[CG]];
[0514] 208. one or more CpGs within DMR 208 as defined by SEQ ID NO: 5208 denoted by CG, preferably wherein the assay is characterised as having an ROC AUC of at least 0.818, and more preferably wherein the panel of one or more CpGs comprises at least the CpGs denoted by [[CG]];
[0515] 209. one or more CpGs within DMR 209 as defined by SEQ ID NO: 5209 denoted by CG, preferably wherein the assay is characterised as having an ROC AUC of at least 0.818, and more preferably wherein the panel of one or more CpGs comprises at least the CpGs denoted by [[CG]];
[0516] 210. one or more CpGs within DMR 210 as defined by SEQ ID NO: 5210 denoted by CG, preferably wherein the assay is characterised as having an ROC AUC of at least 0.818, and more preferably wherein the panel of one or more CpGs comprises at least the CpGs denoted by [[CG]];
[0517] 211. one or more CpGs within DMR 211 as defined by SEQ ID NO: 5211 denoted by CG, preferably wherein the assay is characterised as having an ROC AUC of at least 0.817, and more preferably wherein the panel of one or more CpGs comprises at least the CpGs denoted by [[CG]];
[0518] 212. one or more CpGs within DMR 212 as defined by SEQ ID NO: 5212 denoted by CG, preferably wherein the assay is characterised as having an ROC AUC of at least 0.817, and more preferably wherein the panel of one or more CpGs comprises at least the CpGs denoted by [[CG]];
[0519] 213. one or more CpGs within DMR 213 as defined by SEQ ID NO: 5213 denoted by CG, preferably wherein the assay is characterised as having an ROC AUC of at least 0.817, and more preferably wherein the panel of one or more CpGs comprises at least the CpGs denoted by [[CG]];
[0520] 214. one or more CpGs within DMR 214 as defined by SEQ ID NO: 5214 denoted by CG, preferably wherein the assay is characterised as having an ROC AUC of at least 0.817, and more preferably wherein the panel of one or more CpGs comprises at least the CpGs denoted by [[CG]];
[0521] 215. one or more CpGs within DMR 215 as defined by SEQ ID NO: 5215 denoted by CG, preferably wherein the assay is characterised as having an ROC AUC of at least 0.817, and more preferably wherein the panel of one or more CpGs comprises at least the CpGs denoted by [[CG]];
[0522] 216. one or more CpGs within DMR 216 as defined by SEQ ID NO: 5216 denoted by CG, preferably wherein the assay is characterised as having an ROC AUC of at least 0.817, and more preferably wherein the panel of one or more CpGs comprises at least the CpGs denoted by [[CG]];
[0523] 217. one or more CpGs within DMR 217 as defined by SEQ ID NO: 5217 denoted by CG, preferably wherein the assay is characterised as having an ROC AUC of at least 0.817, and more preferably wherein the panel of one or more CpGs comprises at least the CpGs denoted by [[CG]];
[0524] 218. one or more CpGs within DMR 218 as defined by SEQ ID NO: 5218 denoted by CG, preferably wherein the assay is characterised as having an ROC AUC of at least 0.817, and more preferably wherein the panel of one or more CpGs comprises at least the CpGs denoted by [[CG]];
[0525] 219. one or more CpGs within DMR 219 as defined by SEQ ID NO: 5219 denoted by CG, preferably wherein the assay is characterised as having an ROC AUC of at least 0.817, and more preferably wherein the panel of one or more CpGs comprises at least the CpGs denoted by [[CG]];
[0526] 220. one or more CpGs within DMR 220 as defined by SEQ ID NO: 5220 denoted by CG, preferably wherein the assay is characterised as having an ROC AUC of at least 0.817, and more preferably wherein the panel of one or more CpGs comprises at least the CpGs denoted by [[CG]];
[0527] 221. one or more CpGs within DMR 221 as defined by SEQ ID NO: 5221 denoted by CG, preferably wherein the assay is characterised as having an ROC AUC of at least 0.816, and more preferably wherein the panel of one or more CpGs comprises at least the CpGs denoted by [[CG]];
[0528] 222. one or more CpGs within DMR 222 as defined by SEQ ID NO: 5222 denoted by CG, preferably wherein the assay is characterised as having an ROC AUC of at least 0.816, and more preferably wherein the panel of one or more CpGs comprises at least the CpGs denoted by [[CG]];
[0529] 223. one or more CpGs within DMR 223 as defined by SEQ ID NO: 5223 denoted by CG, preferably wherein the assay is characterised as having an ROC AUC of at least 0.816, and more preferably wherein the panel of one or more CpGs comprises at least the CpGs denoted by [[CG]];
[0530] 224. one or more CpGs within DMR 224 as defined by SEQ ID NO: 5224 denoted by CG, preferably wherein the assay is characterised as having an ROC AUC of at least 0.815, and more preferably wherein the panel of one or more CpGs comprises at least the CpGs denoted by [[CG]];
[0531] 225. one or more CpGs within DMR 225 as defined by SEQ ID NO: 5225 denoted by CG, preferably wherein the assay is characterised as having an ROC AUC of at least 0.815, and more preferably wherein the panel of one or more CpGs comprises at least the CpGs denoted by [[CG]];
[0532] 226. one or more CpGs within DMR 226 as defined by SEQ ID NO: 5226 denoted by CG, preferably wherein the assay is characterised as having an ROC AUC of at least 0.815, and more preferably wherein the panel of one or more CpGs comprises at least the CpGs denoted by [[CG]];
[0533] 227. one or more CpGs within DMR 227 as defined by SEQ ID NO: 5227 denoted by CG, preferably wherein the assay is characterised as having an ROC AUC of at least 0.814, and more preferably wherein the panel of one or more CpGs comprises at least the CpGs denoted by [[CG]];
[0534] 228. one or more CpGs within DMR 228 as defined by SEQ ID NO: 5228 denoted by CG, preferably wherein the assay is characterised as having an ROC AUC of at least 0.814, and more preferably wherein the panel of one or more CpGs comprises at least the CpGs denoted by [[CG]];
[0535] 229. one or more CpGs within DMR 229 as defined by SEQ ID NO: 5229 denoted by CG, preferably wherein the assay is characterised as having an ROC AUC of at least 0.814, and more preferably wherein the panel of one or more CpGs comprises at least the CpGs denoted by [[CG]];
[0536] 230. one or more CpGs within DMR 230 as defined by SEQ ID NO: 5230 denoted by CG, preferably wherein the assay is characterised as having an ROC AUC of at least 0.814, and more preferably wherein the panel of one or more CpGs comprises at least the CpGs denoted by [[CG]];
[0537] 231. one or more CpGs within DMR 231 as defined by SEQ ID NO: 5231 denoted by CG, preferably wherein the assay is characterised as having an ROC AUC of at least 0.814, and more preferably wherein the panel of one or more CpGs comprises at least the CpGs denoted by [[CG]];
[0538] 232. one or more CpGs within DMR 232 as defined by SEQ ID NO: 5232 denoted by CG, preferably wherein the assay is characterised as having an ROC AUC of at least 0.814, and more preferably wherein the panel of one or more CpGs comprises at least the CpGs denoted by [[CG]];
[0539] 233. one or more CpGs within DMR 233 as defined by SEQ ID NO: 5233 denoted by CG, preferably wherein the assay is characterised as having an ROC AUC of at least 0.814, and more preferably wherein the panel of one or more CpGs comprises at least the CpGs denoted by [[CG]];
[0540] 234. one or more CpGs within DMR 234 as defined by SEQ ID NO: 5234 denoted by CG, preferably wherein the assay is characterised as having an ROC AUC of at least 0.814, and more preferably wherein the panel of one or more CpGs comprises at least the CpGs denoted by [[CG]];
[0541] 235. one or more CpGs within DMR 235 as defined by SEQ ID NO: 5235 denoted by CG, preferably wherein the assay is characterised as having an ROC AUC of at least 0.814, and more preferably wherein the panel of one or more CpGs comprises at least the CpGs denoted by [[CG]];
[0542] 236. one or more CpGs within DMR 236 as defined by SEQ ID NO: 5236 denoted by CG, preferably wherein the assay is characterised as having an ROC AUC of at least 0.814, and more preferably wherein the panel of one or more CpGs comprises at least the CpGs denoted by [[CG]];
[0543] 237. one or more CpGs within DMR 237 as defined by SEQ ID NO: 5237 denoted by CG, preferably wherein the assay is characterised as having an ROC AUC of at least 0.814, and more preferably wherein the panel of one or more CpGs comprises at least the CpGs denoted by [[CG]];
[0544] 238. one or more CpGs within DMR 238 as defined by SEQ ID NO: 5238 denoted by CG, preferably wherein the assay is characterised as having an ROC AUC of at least 0.813, and more preferably wherein the panel of one or more CpGs comprises at least the CpGs denoted by [[CG]];
[0545] 239. one or more CpGs within DMR 239 as defined by SEQ ID NO: 5239 denoted by CG, preferably wherein the assay is characterised as having an ROC AUC of at least 0.813, and more preferably wherein the panel of one or more CpGs comprises at least the CpGs denoted by [[CG]];
[0546] 240. one or more CpGs within DMR 240 as defined by SEQ ID NO: 5240 denoted by CG, preferably wherein the assay is characterised as having an ROC AUC of at least 0.813, and more preferably wherein the panel of one or more CpGs comprises at least the CpGs denoted by [[CG]];
[0547] 241. one or more CpGs within DMR 241 as defined by SEQ ID NO: 5241 denoted by CG, preferably wherein the assay is characterised as having an ROC AUC of at least 0.813, and more preferably wherein the panel of one or more CpGs comprises at least the CpGs denoted by [[CG]];
[0548] 242. one or more CpGs within DMR 242 as defined by SEQ ID NO: 5242 denoted by CG, preferably wherein the assay is characterised as having an ROC AUC of at least 0.812, and more preferably wherein the panel of one or more CpGs comprises at least the CpGs denoted by [[CG]];
[0549] 243. one or more CpGs within DMR 243 as defined by SEQ ID NO: 5243 denoted by CG, preferably wherein the assay is characterised as having an ROC AUC of at least 0.812, and more preferably wherein the panel of one or more CpGs comprises at least the CpGs denoted by [[CG]];
[0550] 244. one or more CpGs within DMR 244 as defined by SEQ ID NO: 5244 denoted by CG, preferably wherein the assay is characterised as having an ROC AUC of at least 0.812, and more preferably wherein the panel of one or more CpGs comprises at least the CpGs denoted by [[CG]];
[0551] 245. one or more CpGs within DMR 245 as defined by SEQ ID NO: 5245 denoted by CG, preferably wherein the assay is characterised as having an ROC AUC of at least 0.812, and more preferably wherein the panel of one or more CpGs comprises at least the CpGs denoted by [[CG]];
[0552] 246. one or more CpGs within DMR 246 as defined by SEQ ID NO: 5246 denoted by CG, preferably wherein the assay is characterised as having an ROC AUC of at least 0.812, and more preferably wherein the panel of one or more CpGs comprises at least the CpGs denoted by [[CG]];
[0553] 247. one or more CpGs within DMR 247 as defined by SEQ ID NO: 5247 denoted by CG, preferably wherein the assay is characterised as having an ROC AUC of at least 0.812, and more preferably wherein the panel of one or more CpGs comprises at least the CpGs denoted by [[CG]];
[0554] 248. one or more CpGs within DMR 248 as defined by SEQ ID NO: 5248 denoted by CG, preferably wherein the assay is characterised as having an ROC AUC of at least 0.811, and more preferably wherein the panel of one or more CpGs comprises at least the CpGs denoted by [[CG]];
[0555] 249. one or more CpGs within DMR 249 as defined by SEQ ID NO: 5249 denoted by CG, preferably wherein the assay is characterised as having an ROC AUC of at least 0.811, and more preferably wherein the panel of one or more CpGs comprises at least the CpGs denoted by [[CG]];
[0556] 250. one or more CpGs within DMR 250 as defined by SEQ ID NO: 5250 denoted by CG, preferably wherein the assay is characterised as having an ROC AUC of at least 0.811, and more preferably wherein the panel of one or more CpGs comprises at least the CpGs denoted by [[CG]];
[0557] 251. one or more CpGs within DMR 251 as defined by SEQ ID NO: 5251 denoted by CG, preferably wherein the assay is characterised as having an ROC AUC of at least 0.811, and more preferably wherein the panel of one or more CpGs comprises at least the CpGs denoted by [[CG]];
[0558] 252. one or more CpGs within DMR 252 as defined by SEQ ID NO: 5252 denoted by CG, preferably wherein the assay is characterised as having an ROC AUC of at least 0.81, and more preferably wherein the panel of one or more CpGs comprises at least the CpGs denoted by [[CG]];
[0559] 253. one or more CpGs within DMR 253 as defined by SEQ ID NO: 5253 denoted by CG, preferably wherein the assay is characterised as having an ROC AUC of at least 0.81, and more preferably wherein the panel of one or more CpGs comprises at least the CpGs denoted by [[CG]];
[0560] 254. one or more CpGs within DMR 254 as defined by SEQ ID NO: 5254 denoted by CG, preferably wherein the assay is characterised as having an ROC AUC of at least 0.81, and more preferably wherein the panel of one or more CpGs comprises at least the CpGs denoted by [[CG]];
[0561] 255. one or more CpGs within DMR 255 as defined by SEQ ID NO: 5255 denoted by CG, preferably wherein the assay is characterised as having an ROC AUC of at least 0.81, and more preferably wherein the panel of one or more CpGs comprises at least the CpGs denoted by [[CG]];
[0562] 256. one or more CpGs within DMR 256 as defined by SEQ ID NO: 5256 denoted by CG, preferably wherein the assay is characterised as having an ROC AUC of at least 0.81, and more preferably wherein the panel of one or more CpGs comprises at least the CpGs denoted by [[CG]];
[0563] 257. one or more CpGs within DMR 257 as defined by SEQ ID NO: 5257 denoted by CG, preferably wherein the assay is characterised as having an ROC AUC of at least 0.81, and more preferably wherein the panel of one or more CpGs comprises at least the CpGs denoted by [[CG]];
[0564] 258. one or more CpGs within DMR 258 as defined by SEQ ID NO: 5258 denoted by CG, preferably wherein the assay is characterised as having an ROC AUC of at least 0.809, and more preferably wherein the panel of one or more CpGs comprises at least the CpGs denoted by [[CG]];
[0565] 259. one or more CpGs within DMR 259 as defined by SEQ ID NO: 5259 denoted by CG, preferably wherein the assay is characterised as having an ROC AUC of at least 0.809, and more preferably wherein the panel of one or more CpGs comprises at least the CpGs denoted by [[CG]];
[0566] 260. one or more CpGs within DMR 260 as defined by SEQ ID NO: 5260 denoted by CG, preferably wherein the assay is characterised as having an ROC AUC of at least 0.809, and more preferably wherein the panel of one or more CpGs comprises at least the CpGs denoted by [[CG]];
[0567] 261. one or more CpGs within DMR 261 as defined by SEQ ID NO: 5261 denoted by CG, preferably wherein the assay is characterised as having an ROC AUC of at least 0.809, and more preferably wherein the panel of one or more CpGs comprises at least the CpGs denoted by [[CG]];
[0568] 262. one or more CpGs within DMR 262 as defined by SEQ ID NO: 5262 denoted by CG, preferably wherein the assay is characterised as having an ROC AUC of at least 0.809, and more preferably wherein the panel of one or more CpGs comprises at least the CpGs denoted by [[CG]];
[0569] 263. one or more CpGs within DMR 263 as defined by SEQ ID NO: 5263 denoted by CG, preferably wherein the assay is characterised as having an ROC AUC of at least 0.809, and more preferably wherein the panel of one or more CpGs comprises at least the CpGs denoted by [[CG]];
[0570] 264. one or more CpGs within DMR 264 as defined by SEQ ID NO: 5264 denoted by CG, preferably wherein the assay is characterised as having an ROC AUC of at least 0.808, and more preferably wherein the panel of one or more CpGs comprises at least the CpGs denoted by [[CG]];
[0571] 265. one or more CpGs within DMR 265 as defined by SEQ ID NO: 5265 denoted by CG, preferably wherein the assay is characterised as having an ROC AUC of at least 0.808, and more preferably wherein the panel of one or more CpGs comprises at least the CpGs denoted by [[CG]];
[0572] 266. one or more CpGs within DMR 266 as defined by SEQ ID NO: 5266 denoted by CG, preferably wherein the assay is characterised as having an ROC AUC of at least 0.808, and more preferably wherein the panel of one or more CpGs comprises at least the CpGs denoted by [[CG]];
[0573] 267. one or more CpGs within DMR 267 as defined by SEQ ID NO: 5267 denoted by CG, preferably wherein the assay is characterised as having an ROC AUC of at least 0.808, and more preferably wherein the panel of one or more CpGs comprises at least the CpGs denoted by [[CG]];
[0574] 268. one or more CpGs within DMR 268 as defined by SEQ ID NO: 5268 denoted by CG, preferably wherein the assay is characterised as having an ROC AUC of at least 0.808, and more preferably wherein the panel of one or more CpGs comprises at least the CpGs denoted by [[CG]];
[0575] 269. one or more CpGs within DMR 269 as defined by SEQ ID NO: 5269 denoted by CG, preferably wherein the assay is characterised as having an ROC AUC of at least 0.808, and more preferably wherein the panel of one or more CpGs comprises at least the CpGs denoted by [[CG]];
[0576] 270. one or more CpGs within DMR 270 as defined by SEQ ID NO: 5270 denoted by CG, preferably wherein the assay is characterised as having an ROC AUC of at least 0.808, and more preferably wherein the panel of one or more CpGs comprises at least the CpGs denoted by [[CG]];
[0577] 271. one or more CpGs within DMR 271 as defined by SEQ ID NO: 5271 denoted by CG, preferably wherein the assay is characterised as having an ROC AUC of at least 0.808, and more preferably wherein the panel of one or more CpGs comprises at least the CpGs denoted by [[CG]]; 2
[0578] 272. one or more CpGs within DMR 272 as defined by SEQ ID NO: 5272 denoted by CG, preferably wherein the assay is characterised as having an ROC AUC of at least 0.808, and more preferably wherein the panel of one or more CpGs comprises at least the CpGs denoted by [[CG]];
[0579] 273. one or more CpGs within DMR 273 as defined by SEQ ID NO: 5273 denoted by CG, preferably wherein the assay is characterised as having an ROC AUC of at least 0.808, and more preferably wherein the panel of one or more CpGs comprises at least the CpGs denoted by [[CG]];
[0580] 274. one or more CpGs within DMR 274 as defined by SEQ ID NO: 5274 denoted by CG, preferably wherein the assay is characterised as having an ROC AUC of at least 0.807, and more preferably wherein the panel of one or more CpGs comprises at least the CpGs denoted by [[CG]];
[0581] 275. one or more CpGs within DMR 275 as defined by SEQ ID NO: 5275 denoted by CG, preferably wherein the assay is characterised as having an ROC AUC of at least 0.807, and more preferably wherein the panel of one or more CpGs comprises at least the CpGs denoted by [[CG]];
[0582] 276. one or more CpGs within DMR 276 as defined by SEQ ID NO: 5276 denoted by CG, preferably wherein the assay is characterised as having an ROC AUC of at least 0.807, and more preferably wherein the panel of one or more CpGs comprises at least the CpGs denoted by [[CG]];
[0583] 277. one or more CpGs within DMR 277 as defined by SEQ ID NO: 5277 denoted by CG, preferably wherein the assay is characterised as having an ROC AUC of at least 0.807, and more preferably wherein the panel of one or more CpGs comprises at least the CpGs denoted by [[CG]];
[0584] 278. one or more CpGs within DMR 278 as defined by SEQ ID NO: 5278 denoted by CG, preferably wherein the assay is characterised as having an ROC AUC of at least 0.807, and more preferably wherein the panel of one or more CpGs comprises at least the CpGs denoted by [[CG]];
[0585] 279. one or more CpGs within DMR 279 as defined by SEQ ID NO: 5279 denoted by CG, preferably wherein the assay is characterised as having an ROC AUC of at least 0.807, and more preferably wherein the panel of one or more CpGs comprises at least the CpGs denoted by [[CG]];
[0586] 280. one or more CpGs within DMR 280 as defined by SEQ ID NO: 5280 denoted by CG, preferably wherein the assay is characterised as having an ROC AUC of at least 0.807, and more preferably wherein the panel of one or more CpGs comprises at least the CpGs denoted by [[CG]];
[0587] 281. one or more CpGs within DMR 281 as defined by SEQ ID NO: 5281 denoted by CG, preferably wherein the assay is characterised as having an ROC AUC of at least 0.807, and more preferably wherein the panel of one or more CpGs comprises at least the CpGs denoted by [[CG]];
[0588] 282. one or more CpGs within DMR 282 as defined by SEQ ID NO: 5282 denoted by CG, preferably wherein the assay is characterised as having an ROC AUC of at least 0.807, and more preferably wherein the panel of one or more CpGs comprises at least the CpGs denoted by [[CG]];
[0589] 283. one or more CpGs within DMR 283 as defined by SEQ ID NO: 5283 denoted by CG, preferably wherein the assay is characterised as having an ROC AUC of at least 0.807, and more preferably wherein the panel of one or more CpGs comprises at least the CpGs denoted by [[CG]];
[0590] 284. one or more CpGs within DMR 284 as defined by SEQ ID NO: 5284 denoted by CG, preferably wherein the assay is characterised as having an ROC AUC of at least 0.807, and more preferably wherein the panel of one or more CpGs comprises at least the CpGs denoted by [[CG]];
[0591] 285. one or more CpGs within DMR 285 as defined by SEQ ID NO: 5285 denoted by CG, preferably wherein the assay is characterised as having an ROC AUC of at least 0.806, and more preferably wherein the panel of one or more CpGs comprises at least the CpGs denoted by [[CG]];
[0592] 286. one or more CpGs within DMR 286 as defined by SEQ ID NO: 5286 denoted by CG, preferably wherein the assay is characterised as having an ROC AUC of at least 0.806, and more preferably wherein the panel of one or more CpGs comprises at least the CpGs denoted by [[CG]];
[0593] 287. one or more CpGs within DMR 287 as defined by SEQ ID NO: 5287 denoted by CG, preferably wherein the assay is characterised as having an ROC AUC of at least 0.806, and more preferably wherein the panel of one or more CpGs comprises at least the CpGs denoted by [[CG]];
[0594] 288. one or more CpGs within DMR 288 as defined by SEQ ID NO: 5288 denoted by CG, preferably wherein the assay is characterised as having an ROC AUC of at least 0.806, and more preferably wherein the panel of one or more CpGs comprises at least the CpGs denoted by [[CG]];
[0595] 289. one or more CpGs within DMR 289 as defined by SEQ ID NO: 5289 denoted by CG, preferably wherein the assay is characterised as having an ROC AUC of at least 0.806, and more preferably wherein the panel of one or more CpGs comprises at least the CpGs denoted by [[CG]];
[0596] 290. one or more CpGs within DMR 290 as defined by SEQ ID NO: 5290 denoted by CG, preferably wherein the assay is characterised as having an ROC AUC of at least 0.806, and more preferably wherein the panel of one or more CpGs comprises at least the CpGs denoted by [[CG]];
[0597] 291. one or more CpGs within DMR 291 as defined by SEQ ID NO: 5291 denoted by CG, preferably wherein the assay is characterised as having an ROC AUC of at least 0.806, and more preferably wherein the panel of one or more CpGs comprises at least the CpGs denoted by [[CG]];
[0598] 292. one or more CpGs within DMR 292 as defined by SEQ ID NO: 5292 denoted by CG, preferably wherein the assay is characterised as having an ROC AUC of at least 0.805, and more preferably wherein the panel of one or more CpGs comprises at least the CpGs denoted by [[CG]];
[0599] 293. one or more CpGs within DMR 293 as defined by SEQ ID NO: 5293 denoted by CG, preferably wherein the assay is characterised as having an ROC AUC of at least 0.805, and more preferably wherein the panel of one or more CpGs comprises at least the CpGs denoted by [[CG]];
[0600] 294. one or more CpGs within DMR 294 as defined by SEQ ID NO: 5294 denoted by CG, preferably wherein the assay is characterised as having an ROC AUC of at least 0.805, and more preferably wherein the panel of one or more CpGs comprises at least the CpGs denoted by [[CG]];
[0601] 295. one or more CpGs within DMR 295 as defined by SEQ ID NO: 5295 denoted by CG, preferably wherein the assay is characterised as having an ROC AUC of at least 0.805, and more preferably wherein the panel of one or more CpGs comprises at least the CpGs denoted by [[CG]];
[0602] 296. one or more CpGs within DMR 296 as defined by SEQ ID NO: 5296 denoted by CG, preferably wherein the assay is characterised as having an ROC AUC of at least 0.805, and more preferably wherein the panel of one or more CpGs comprises at least the CpGs denoted by [[CG]];
[0603] 297. one or more CpGs within DMR 297 as defined by SEQ ID NO: 5297 denoted by CG, preferably wherein the assay is characterised as having an ROC AUC of at least 0.805, and more preferably wherein the panel of one or more CpGs comprises at least the CpGs denoted by [[CG]];
[0604] 298. one or more CpGs within DMR 298 as defined by SEQ ID NO: 5298 denoted by CG, preferably wherein the assay is characterised as having an ROC AUC of at least 0.805, and more preferably wherein the panel of one or more CpGs comprises at least the CpGs denoted by [[CG]];
[0605] 299. one or more CpGs within DMR 299 as defined by SEQ ID NO: 5299 denoted by CG, preferably wherein the assay is characterised as having an ROC AUC of at least 0.805, and more preferably wherein the panel of one or more CpGs comprises at least the CpGs denoted by [[CG]];
[0606] 300. one or more CpGs within DMR 300 as defined by SEQ ID NO: 5300 denoted by CG, preferably wherein the assay is characterised as having an ROC AUC of at least 0.805, and more preferably wherein the panel of one or more CpGs comprises at least the CpGs denoted by [[CG]];
[0607] 301. one or more CpGs within DMR 301 as defined by SEQ ID NO: 5301 denoted by CG, preferably wherein the assay is characterised as having an ROC AUC of at least 0.805, and more preferably wherein the panel of one or more CpGs comprises at least the CpGs denoted by [[CG]];
[0608] 302. one or more CpGs within DMR 302 as defined by SEQ ID NO: 5302 denoted by CG, preferably wherein the assay is characterised as having an ROC AUC of at least 0.805, and more preferably wherein the panel of one or more CpGs comprises at least the CpGs denoted by [[CG]];
[0609] 303. one or more CpGs within DMR 303 as defined by SEQ ID NO: 5303 denoted by CG, preferably wherein the assay is characterised as having an ROC AUC of at least 0.805, and more preferably wherein the panel of one or more CpGs comprises at least the CpGs denoted by [[CG]];
[0610] 304. one or more CpGs within DMR 304 as defined by SEQ ID NO: 5304 denoted by CG, preferably wherein the assay is characterised as having an ROC AUC of at least 0.805, and more preferably wherein the panel of one or more CpGs comprises at least the CpGs denoted by [[CG]];
[0611] 305. one or more CpGs within DMR 305 as defined by SEQ ID NO: 5305 denoted by CG, preferably wherein the assay is characterised as having an ROC AUC of at least 0.804, and more preferably wherein the panel of one or more CpGs comprises at least the CpGs denoted by [[CG]];
[0612] 306. one or more CpGs within DMR 306 as defined by SEQ ID NO: 5306 denoted by CG, preferably wherein the assay is characterised as having an ROC AUC of at least 0.804, and more preferably wherein the panel of one or more CpGs comprises at least the CpGs denoted by [[CG]];
[0613] 307. one or more CpGs within DMR 307 as defined by SEQ ID NO: 5307 denoted by CG, preferably wherein the assay is characterised as having an ROC AUC of at least 0.804, and more preferably wherein the panel of one or more CpGs comprises at least the CpGs denoted by [[CG]];
[0614] 308. one or more CpGs within DMR 308 as defined by SEQ ID NO: 5308 denoted by CG, preferably wherein the assay is characterised as having an ROC AUC of at least 0.804, and more preferably wherein the panel of one or more CpGs comprises at least the CpGs denoted by [[CG]];
[0615] 309. one or more CpGs within DMR 309 as defined by SEQ ID NO: 5309 denoted by CG, preferably wherein the assay is characterised as having an ROC AUC of at least 0.804, and more preferably wherein the panel of one or more CpGs comprises at least the CpGs denoted by [[CG]];
[0616] 310. one or more CpGs within DMR 310 as defined by SEQ ID NO: 5310 denoted by CG, preferably wherein the assay is characterised as having an ROC AUC of at least 0.804, and more preferably wherein the panel of one or more CpGs comprises at least the CpGs denoted by [[CG]];
[0617] 311. one or more CpGs within DMR 311 as defined by SEQ ID NO: 5311 denoted by CG, preferably wherein the assay is characterised as having an ROC AUC of at least 0.804, and more preferably wherein the panel of one or more CpGs comprises at least the CpGs denoted by [[CG]];
[0618] 312. one or more CpGs within DMR 312 as defined by SEQ ID NO: 5312 denoted by CG, preferably wherein the assay is characterised as having an ROC AUC of at least 0.804, and more preferably wherein the panel of one or more CpGs comprises at least the CpGs denoted by [[CG]];
[0619] 313. one or more CpGs within DMR 313 as defined by SEQ ID NO: 5313 denoted by CG, preferably wherein the assay is characterised as having an ROC AUC of at least 0.803, and more preferably wherein the panel of one or more CpGs comprises at least the CpGs denoted by [[CG]];
[0620] 314. one or more CpGs within DMR 314 as defined by SEQ ID NO: 5314 denoted by CG, preferably wherein the assay is characterised as having an ROC AUC of at least 0.803, and more preferably wherein the panel of one or more CpGs comprises at least the CpGs denoted by [[CG]];
[0621] 315. one or more CpGs within DMR 315 as defined by SEQ ID NO: 5315 denoted by CG, preferably wherein the assay is characterised as having an ROC AUC of at least 0.803, and more preferably wherein the panel of one or more CpGs comprises at least the CpGs denoted by [[CG]];
[0622] 316. one or more CpGs within DMR 316 as defined by SEQ ID NO: 5316 denoted by CG, preferably wherein the assay is characterised as having an ROC AUC of at least 0.803, and more preferably wherein the panel of one or more CpGs comprises at least the CpGs denoted by [[CG]];
[0623] 317. one or more CpGs within DMR 317 as defined by SEQ ID NO: 5317 denoted by CG, preferably wherein the assay is characterised as having an ROC AUC of at least 0.803, and more preferably wherein the panel of one or more CpGs comprises at least the CpGs denoted by [[CG]];
[0624] 318. one or more CpGs within DMR 318 as defined by SEQ ID NO: 5318 denoted by CG, preferably wherein the assay is characterised as having an ROC AUC of at least 0.803, and more preferably wherein the panel of one or more CpGs comprises at least the CpGs denoted by [[CG]];
[0625] 319. one or more CpGs within DMR 319 as defined by SEQ ID NO: 5319 denoted by CG, preferably wherein the assay is characterised as having an ROC AUC of at least 0.803, and more preferably wherein the panel of one or more CpGs comprises at least the CpGs denoted by [[CG]];
[0626] 320. one or more CpGs within DMR 320 as defined by SEQ ID NO: 5320 denoted by CG, preferably wherein the assay is characterised as having an ROC AUC of at least 0.803, and more preferably wherein the panel of one or more CpGs comprises at least the CpGs denoted by [[CG]];
[0627] 321. one or more CpGs within DMR 321 as defined by SEQ ID NO: 5321 denoted by CG, preferably wherein the assay is characterised as having an ROC AUC of at least 0.803, and more preferably wherein the panel of one or more CpGs comprises at least the CpGs denoted by [[CG]];
[0628] 322. one or more CpGs within DMR 322 as defined by SEQ ID NO: 5322 denoted by CG, preferably wherein the assay is characterised as having an ROC AUC of at least 0.803, and more preferably wherein the panel of one or more CpGs comprises at least the CpGs denoted by [[CG]];
[0629] 323. one or more CpGs within DMR 323 as defined by SEQ ID NO: 5323 denoted by CG, preferably wherein the assay is characterised as having an ROC AUC of at least 0.803, and more preferably wherein the panel of one or more CpGs comprises at least the CpGs denoted by [[CG]];
[0630] 324. one or more CpGs within DMR 324 as defined by SEQ ID NO: 5324 denoted by CG, preferably wherein the assay is characterised as having an ROC AUC of at least 0.803, and more preferably wherein the panel of one or more CpGs comprises at least the CpGs denoted by [[CG]];
[0631] 325. one or more CpGs within DMR 325 as defined by SEQ ID NO: 5325 denoted by CG, preferably wherein the assay is characterised as having an ROC AUC of at least 0.802, and more preferably wherein the panel of one or more CpGs comprises at least the CpGs denoted by [[CG]];
[0632] 326. one or more CpGs within DMR 326 as defined by SEQ ID NO: 5326 denoted by CG, preferably wherein the assay is characterised as having an ROC AUC of at least 0.802, and more preferably wherein the panel of one or more CpGs comprises at least the CpGs denoted by [[CG]];
[0633] 327. one or more CpGs within DMR 327 as defined by SEQ ID NO: 5327 denoted by CG, preferably wherein the assay is characterised as having an ROC AUC of at least 0.802, and more preferably wherein the panel of one or more CpGs comprises at least the CpGs denoted by [[CG]];
[0634] 328. one or more CpGs within DMR 328 as defined by SEQ ID NO: 5328 denoted by CG, preferably wherein the assay is characterised as having an ROC AUC of at least 0.802, and more preferably wherein the panel of one or more CpGs comprises at least the CpGs denoted by [[CG]];
[0635] 329. one or more CpGs within DMR 329 as defined by SEQ ID NO: 5329 denoted by CG, preferably wherein the assay is characterised as having an ROC AUC of at least 0.802, and more preferably wherein the panel of one or more CpGs comprises at least the CpGs denoted by [[CG]];
[0636] 330. one or more CpGs within DMR 330 as defined by SEQ ID NO: 5330 denoted by CG, preferably wherein the assay is characterised as having an ROC AUC of at least 0.802, and more preferably wherein the panel of one or more CpGs comprises at least the CpGs denoted by [[CG]];
[0637] 331. one or more CpGs within DMR 331 as defined by SEQ ID NO: 5331 denoted by CG, preferably wherein the assay is characterised as having an ROC AUC of at least 0.802, and more preferably wherein the panel of one or more CpGs comprises at least the CpGs denoted by [[CG]];
[0638] 332. one or more CpGs within DMR 332 as defined by SEQ ID NO: 5332 denoted by CG, preferably wherein the assay is characterised as having an ROC AUC of at least 0.802, and more preferably wherein the panel of one or more CpGs comprises at least the CpGs denoted by [[CG]];
[0639] 333. one or more CpGs within DMR 333 as defined by SEQ ID NO: 5333 denoted by CG, preferably wherein the assay is characterised as having an ROC AUC of at least 0.802, and more preferably wherein the panel of one or more CpGs comprises at least the CpGs denoted by [[CG]];
[0640] 334. one or more CpGs within DMR 334 as defined by SEQ ID NO: 5334 denoted by CG, preferably wherein the assay is characterised as having an ROC AUC of at least 0.802, and more preferably wherein the panel of one or more CpGs comprises at least the CpGs denoted by [[CG]];
[0641] 335. one or more CpGs within DMR 335 as defined by SEQ ID NO: 5335 denoted by CG, preferably wherein the assay is characterised as having an ROC AUC of at least 0.802, and more preferably wherein the panel of one or more CpGs comprises at least the CpGs denoted by [[CG]];
[0642] 336. one or more CpGs within DMR 336 as defined by SEQ ID NO: 5336 denoted by CG, preferably wherein the assay is characterised as having an ROC AUC of at least 0.802, and more preferably wherein the panel of one or more CpGs comprises at least the CpGs denoted by [[CG]];
[0643] 337. one or more CpGs within DMR 337 as defined by SEQ ID NO: 5337 denoted by CG, preferably wherein the assay is characterised as having an ROC AUC of at least 0.802, and more preferably wherein the panel of one or more CpGs comprises at least the CpGs denoted by [[CG]];
[0644] 338. one or more CpGs within DMR 338 as defined by SEQ ID NO: 5338 denoted by CG, preferably wherein the assay is characterised as having an ROC AUC of at least 0.802, and more preferably wherein the panel of one or more CpGs comprises at least the CpGs denoted by [[CG]];
[0645] 339. one or more CpGs within DMR 339 as defined by SEQ ID NO: 5339 denoted by CG, preferably wherein the assay is characterised as having an ROC AUC of at least 0.802, and more preferably wherein the panel of one or more CpGs comprises at least the CpGs denoted by [[CG]];
[0646] 340. one or more CpGs within DMR 340 as defined by SEQ ID NO: 5340 denoted by CG, preferably wherein the assay is characterised as having an ROC AUC of at least 0.802, and more preferably wherein the panel of one or more CpGs comprises at least the CpGs denoted by [[CG]];
[0647] 341. one or more CpGs within DMR 341 as defined by SEQ ID NO: 5341 denoted by CG, preferably wherein the assay is characterised as having an ROC AUC of at least 0.802, and more preferably wherein the panel of one or more CpGs comprises at least the CpGs denoted by [[CG]];
[0648] 342. one or more CpGs within DMR 342 as defined by SEQ ID NO: 5342 denoted by CG, preferably wherein the assay is characterised as having an ROC AUC of at least 0.802, and more preferably wherein the panel of one or more CpGs comprises at least the CpGs denoted by [[CG]];
[0649] 343. one or more CpGs within DMR 343 as defined by SEQ ID NO: 5343 denoted by CG, preferably wherein the assay is characterised as having an ROC AUC of at least 0.802, and more preferably wherein the panel of one or more CpGs comprises at least the CpGs denoted by [[CG]];
[0650] 344. one or more CpGs within DMR 344 as defined by SEQ ID NO: 5344 denoted by CG, preferably wherein the assay is characterised as having an ROC AUC of at least 0.801, and more preferably wherein the panel of one or more CpGs comprises at least the CpGs denoted by [[CG]];
[0651] 345. one or more CpGs within DMR 345 as defined by SEQ ID NO: 5345 denoted by CG, preferably wherein the assay is characterised as having an ROC AUC of at least 0.801, and more preferably wherein the panel of one or more CpGs comprises at least the CpGs denoted by [[CG]];
[0652] 346. one or more CpGs within DMR 346 as defined by SEQ ID NO: 5346 denoted by CG, preferably wherein the assay is characterised as having an ROC AUC of at least 0.801, and more preferably wherein the panel of one or more CpGs comprises at least the CpGs denoted by [[CG]];
[0653] 347. one or more CpGs within DMR 347 as defined by SEQ ID NO: 5347 denoted by CG, preferably wherein the assay is characterised as having an ROC AUC of at least 0.801, and more preferably wherein the panel of one or more CpGs comprises at least the CpGs denoted by [[CG]];
[0654] 348. one or more CpGs within DMR 348 as defined by SEQ ID NO: 5348 denoted by CG, preferably wherein the assay is characterised as having an ROC AUC of at least 0.801, and more preferably wherein the panel of one or more CpGs comprises at least the CpGs denoted by [[CG]];
[0655] 349. one or more CpGs within DMR 349 as defined by SEQ ID NO: 5349 denoted by CG, preferably wherein the assay is characterised as having an ROC AUC of at least 0.801, and more preferably wherein the panel of one or more CpGs comprises at least the CpGs denoted by [[CG]];
[0656] 350. one or more CpGs within DMR 350 as defined by SEQ ID NO: 5350 denoted by CG, preferably wherein the assay is characterised as having an ROC AUC of at least 0.801, and more preferably wherein the panel of one or more CpGs comprises at least the CpGs denoted by [[CG]];
[0657] 351. one or more CpGs within DMR 351 as defined by SEQ ID NO: 5351 denoted by CG, preferably wherein the assay is characterised as having an ROC AUC of at least 0.801, and more preferably wherein the panel of one or more CpGs comprises at least the CpGs denoted by [[CG]];
[0658] 352. one or more CpGs within DMR 352 as defined by SEQ ID NO: 5352 denoted by CG, preferably wherein the assay is characterised as having an ROC AUC of at least 0.801, and more preferably wherein the panel of one or more CpGs comprises at least the CpGs denoted by [[CG]];
[0659] 353. one or more CpGs within DMR 353 as defined by SEQ ID NO: 5353 denoted by CG, preferably wherein the assay is characterised as having an ROC AUC of at least 0.801, and more preferably wherein the panel of one or more CpGs comprises at least the CpGs denoted by [[CG]];
[0660] 354. one or more CpGs within DMR 354 as defined by SEQ ID NO: 5354 denoted by CG, preferably wherein the assay is characterised as having an ROC AUC of at least 0.801, and more preferably wherein the panel of one or more CpGs comprises at least the CpGs denoted by [[CG]];
[0661] 355. one or more CpGs within DMR 355 as defined by SEQ ID NO: 5355 denoted by CG, preferably wherein the assay is characterised as having an ROC AUC of at least 0.801, and more preferably wherein the panel of one or more CpGs comprises at least the CpGs denoted by [[CG]];
[0662] 356. one or more CpGs within DMR 356 as defined by SEQ ID NO: 5356 denoted by CG, preferably wherein the assay is characterised as having an ROC AUC of at least 0.801, and more preferably wherein the panel of one or more CpGs comprises at least the CpGs denoted by [[CG]];
[0663] 357. one or more CpGs within DMR 357 as defined by SEQ ID NO: 5357 denoted by CG, preferably wherein the assay is characterised as having an ROC AUC of at least 0.801, and more preferably wherein the panel of one or more CpGs comprises at least the CpGs denoted by [[CG]];
[0664] 358. one or more CpGs within DMR 358 as defined by SEQ ID NO: 5358 denoted by CG, preferably wherein the assay is characterised as having an ROC AUC of at least 0.801, and more preferably wherein the panel of one or more CpGs comprises at least the CpGs denoted by [[CG]];
[0665] 359. one or more CpGs within DMR 359 as defined by SEQ ID NO: 5359 denoted by CG, preferably wherein the assay is characterised as having an ROC AUC of at least 0.801, and more preferably wherein the panel of one or more CpGs comprises at least the CpGs denoted by [[CG]];
[0666] 360. one or more CpGs within DMR 360 as defined by SEQ ID NO: 5360 denoted by CG, preferably wherein the assay is characterised as having an ROC AUC of at least 0.801, and more preferably wherein the panel of one or more CpGs comprises at least the CpGs denoted by [[CG]];
[0667] 361. one or more CpGs within DMR 361 as defined by SEQ ID NO: 5361 denoted by CG, preferably wherein the assay is characterised as having an ROC AUC of at least 0.801, and more preferably wherein the panel of one or more CpGs comprises at least the CpGs denoted by [[CG]];
[0668] 362. one or more CpGs within DMR 362 as defined by SEQ ID NO: 5362 denoted by CG, preferably wherein the assay is characterised as having an ROC AUC of at least 0.801, and more preferably wherein the panel of one or more CpGs comprises at least the CpGs denoted by [[CG]];
[0669] 363. one or more CpGs within DMR 363 as defined by SEQ ID NO: 5363 denoted by CG, preferably wherein the assay is characterised as having an ROC AUC of at least 0.801, and more preferably wherein the panel of one or more CpGs comprises at least the CpGs denoted by [[CG]];
[0670] 364. one or more CpGs within DMR 364 as defined by SEQ ID NO: 5364 denoted by CG, preferably wherein the assay is characterised as having an ROC AUC of at least 0.801, and more preferably wherein the panel of one or more CpGs comprises at least the CpGs denoted by [[CG]];
[0671] 365. one or more CpGs within DMR 365 as defined by SEQ ID NO: 5365 denoted by CG, preferably wherein the assay is characterised as having an ROC AUC of at least 0.801, and more preferably wherein the panel of one or more CpGs comprises at least the CpGs denoted by [[CG]];
[0672] 366. one or more CpGs within DMR 366 as defined by SEQ ID NO: 5366 denoted by CG, preferably wherein the assay is characterised as having an ROC AUC of at least 0.801, and more preferably wherein the panel of one or more CpGs comprises at least the CpGs denoted by [[CG]];
[0673] 367. one or more CpGs within DMR 367 as defined by SEQ ID NO: 5367 denoted by CG, preferably wherein the assay is characterised as having an ROC AUC of at least 0.801, and more preferably wherein the panel of one or more CpGs comprises at least the CpGs denoted by [[CG]];
[0674] 368. one or more CpGs within DMR 368 as defined by SEQ ID NO: 5368 denoted by CG, preferably wherein the assay is characterised as having an ROC AUC of at least 0.801, and more preferably wherein the panel of one or more CpGs comprises at least the CpGs denoted by [[CG]];
[0675] 369. one or more CpGs within DMR 369 as defined by SEQ ID NO: 5369 denoted by CG, preferably wherein the assay is characterised as having an ROC AUC of at least 0.801, and more preferably wherein the panel of one or more CpGs comprises at least the CpGs denoted by [[CG]];
[0676] 370. one or more CpGs within DMR 370 as defined by SEQ ID NO: 5370 denoted by CG, preferably wherein the assay is characterised as having an ROC AUC of at least 0.801, and more preferably wherein the panel of one or more CpGs comprises at least the CpGs denoted by [[CG]];
[0677] 371. one or more CpGs within DMR 371 as defined by SEQ ID NO: 5371 denoted by CG, preferably wherein the assay is characterised as having an ROC AUC of at least 0.801, and more preferably wherein the panel of one or more CpGs comprises at least the CpGs denoted by [[CG]];
[0678] 372. one or more CpGs within DMR 372 as defined by SEQ ID NO: 5372 denoted by CG, preferably wherein the assay is characterised as having an ROC AUC of at least 0.801, and more preferably wherein the panel of one or more CpGs comprises at least the CpGs denoted by [[CG]];
[0679] 373. one or more CpGs within DMR 373 as defined by SEQ ID NO: 5373 denoted by CG, preferably wherein the assay is characterised as having an ROC AUC of at least 0.801, and more preferably wherein the panel of one or more CpGs comprises at least the CpGs denoted by [[CG]];
[0680] 374. one or more CpGs within DMR 374 as defined by SEQ ID NO: 5374 denoted by CG, preferably wherein the assay is characterised as having an ROC AUC of at least 0.801, and more preferably wherein the panel of one or more CpGs comprises at least the CpGs denoted by [[CG]];
[0681] 375. one or more CpGs within DMR 375 as defined by SEQ ID NO: 5375 denoted by CG, preferably wherein the assay is characterised as having an ROC AUC of at least 0.800, and more preferably wherein the panel of one or more CpGs comprises at least the CpGs denoted by [[CG]];
[0682] 376. one or more CpGs within DMR 376 as defined by SEQ ID NO: 5376 denoted by CG, preferably wherein the assay is characterised as having an ROC AUC of at least 0.800, and more preferably wherein the panel of one or more CpGs comprises at least the CpGs denoted by [[CG]];
[0683] 377. one or more CpGs within DMR 377 as defined by SEQ ID NO: 5377 denoted by CG, preferably wherein the assay is characterised as having an ROC AUC of at least 0.800, and more preferably wherein the panel of one or more CpGs comprises at least the CpGs denoted by [[CG]];
[0684] 378. one or more CpGs within DMR 378 as defined by SEQ ID NO: 5378 denoted by CG, preferably wherein the assay is characterised as having an ROC AUC of at least 0.800, and more preferably wherein the panel of one or more CpGs comprises at least the CpGs denoted by [[CG]];
[0685] 379. one or more CpGs within DMR 379 as defined by SEQ ID NO: 5379 denoted by CG, preferably wherein the assay is characterised as having an ROC AUC of at least 0.800, and more preferably wherein the panel of one or more CpGs comprises at least the CpGs denoted by [[CG]];
[0686] 380. one or more CpGs within DMR 380 as defined by SEQ ID NO: 5380 denoted by CG, preferably wherein the assay is characterised as having an ROC AUC of at least 0.800, and more preferably wherein the panel of one or more CpGs comprises at least the CpGs denoted by [[CG]];
[0687] 381. one or more CpGs within DMR 381 as defined by SEQ ID NO: 5381 denoted by CG, preferably wherein the assay is characterised as having an ROC AUC of at least 0.800, and more preferably wherein the panel of one or more CpGs comprises at least the CpGs denoted by [[CG]];
[0688] 382. one or more CpGs within DMR 382 as defined by SEQ ID NO: 5382 denoted by CG, preferably wherein the assay is characterised as having an ROC AUC of at least 0.800, and more preferably wherein the panel of one or more CpGs comprises at least the CpGs denoted by [[CG]];
[0689] 383. one or more CpGs within DMR 383 as defined by SEQ ID NO: 5383 denoted by CG, preferably wherein the assay is characterised as having an ROC AUC of at least 0.800, and more preferably wherein the panel of one or more CpGs comprises at least the CpGs denoted by [[CG]];
[0690] 384. one or more CpGs within DMR 384 as defined by SEQ ID NO: 5384 denoted by CG, preferably wherein the assay is characterised as having an ROC AUC of at least 0.800, and more preferably wherein the panel of one or more CpGs comprises at least the CpGs denoted by [[CG]];
[0691] 385. one or more CpGs within DMR 385 as defined by SEQ ID NO: 5385 denoted by CG, preferably wherein the assay is characterised as having an ROC AUC of at least 0.800, and more preferably wherein the panel of one or more CpGs comprises at least the CpGs denoted by [[CG]];
[0692] 386. one or more CpGs within DMR 386 as defined by SEQ ID NO: 5386 denoted by CG, preferably wherein the assay is characterised as having an ROC AUC of at least 0.800, and more preferably wherein the panel of one or more CpGs comprises at least the CpGs denoted by [[CG]];
[0693] 387. one or more CpGs within DMR 387 as defined by SEQ ID NO: 5387 denoted by CG, preferably wherein the assay is characterised as having an ROC AUC of at least 0.800, and more preferably wherein the panel of one or more CpGs comprises at least the CpGs denoted by [[CG]];
[0694] 388. one or more CpGs within DMR 388 as defined by SEQ ID NO: 5388 denoted by CG, preferably wherein the assay is characterised as having an ROC AUC of at least 0.800, and more preferably wherein the panel of one or more CpGs comprises at least the CpGs denoted by [[CG]];
[0695] 389. one or more CpGs within DMR 389 as defined by SEQ ID NO: 5389 denoted by CG, preferably wherein the assay is characterised as having an ROC AUC of at least 0.800, and more preferably wherein the panel of one or more CpGs comprises at least the CpGs denoted by [[CG]];
[0696] 390. one or more CpGs within DMR 390 as defined by SEQ ID NO: 5390 denoted by CG, preferably wherein the assay is characterised as having an ROC AUC of at least 0.800, and more preferably wherein the panel of one or more CpGs comprises at least the CpGs denoted by [[CG]];
[0697] 391. one or more CpGs within DMR 391 as defined by SEQ ID NO: 5391 denoted by CG, preferably wherein the assay is characterised as having an ROC AUC of at least 0.860, and more preferably wherein the panel of one or more CpGs comprises at least the CpGs denoted by [[CG]];
[0698] 392. one or more CpGs within DMR 392 as defined by SEQ ID NO: 5392 denoted by CG, preferably wherein the assay is characterised as having an ROC AUC of at least 0.858, and more preferably wherein the panel of one or more CpGs comprises at least the CpGs denoted by [[CG]];
[0699] 393. one or more CpGs within DMR 393 as defined by SEQ ID NO: 5393 denoted by CG, preferably wherein the assay is characterised as having an ROC AUC of at least 0.855, and more preferably wherein the panel of one or more CpGs comprises at least the CpGs denoted by [[CG]];
[0700] 394. one or more CpGs within DMR 394 as defined by SEQ ID NO: 5394 denoted by CG, preferably wherein the assay is characterised as having an ROC AUC of at least 0.851, and more preferably wherein the panel of one or more CpGs comprises at least the CpGs denoted by [[CG]];
[0701] 395. one or more CpGs within DMR 395 as defined by SEQ ID NO: 5395 denoted by CG, preferably wherein the assay is characterised as having an ROC AUC of at least 0.845, and more preferably wherein the panel of one or more CpGs comprises at least the CpGs denoted by [[CG]];
[0702] 396. one or more CpGs within DMR 396 as defined by SEQ ID NO: 5396 denoted by CG, preferably wherein the assay is characterised as having an ROC AUC of at least 0.839, and more preferably wherein the panel of one or more CpGs comprises at least the CpGs denoted by [[CG]];
[0703] 397. one or more CpGs within DMR 397 as defined by SEQ ID NO: 5397 denoted by CG, preferably wherein the assay is characterised as having an ROC AUC of at least 0.839, and more preferably wherein the panel of one or more CpGs comprises at least the CpGs denoted by [[CG]];
[0704] 398. one or more CpGs within DMR 398 as defined by SEQ ID NO: 5398 denoted by CG, preferably wherein the assay is characterised as having an ROC AUC of at least 0.837, and more preferably wherein the panel of one or more CpGs comprises at least the CpGs denoted by [[CG]];
[0705] 399. one or more CpGs within DMR 399 as defined by SEQ ID NO: 5399 denoted by CG, preferably wherein the assay is characterised as having an ROC AUC of at least 0.835, and more preferably wherein the panel of one or more CpGs comprises at least the CpGs denoted by [[CG]];
[0706] 400. one or more CpGs within DMR 400 as defined by SEQ ID NO: 5400 denoted by CG, preferably wherein the assay is characterised as having an ROC AUC of at least 0.834, and more preferably wherein the panel of one or more CpGs comprises at least the CpGs denoted by [[CG]];
[0707] 401. one or more CpGs within DMR 401 as defined by SEQ ID NO: 5401 denoted by CG, preferably wherein the assay is characterised as having an ROC AUC of at least 0.827, and more preferably wherein the panel of one or more CpGs comprises at least the CpGs denoted by [[CG]];
[0708] 402. one or more CpGs within DMR 402 as defined by SEQ ID NO: 5402 denoted by CG, preferably wherein the assay is characterised as having an ROC AUC of at least 0.825, and more preferably wherein the panel of one or more CpGs comprises at least the CpGs denoted by [[CG]];
[0709] 403. one or more CpGs within DMR 403 as defined by SEQ ID NO: 5403 denoted by CG, preferably wherein the assay is characterised as having an ROC AUC of at least 0.825, and more preferably wherein the panel of one or more CpGs comprises at least the CpGs denoted by [[CG]];
[0710] 404. one or more CpGs within DMR 404 as defined by SEQ ID NO: 5404 denoted by CG, preferably wherein the assay is characterised as having an ROC AUC of at least 0.814, and more preferably wherein the panel of one or more CpGs comprises at least the CpGs denoted by [[CG]];
[0711] 405. one or more CpGs within DMR 405 as defined by SEQ ID NO: 5405 denoted by CG, preferably wherein the assay is characterised as having an ROC AUC of at least 0.811, and more preferably wherein the panel of one or more CpGs comprises at least the CpGs denoted by [[CG]];
[0712] 406. one or more CpGs within DMR 406 as defined by SEQ ID NO: 5406 denoted by CG, preferably wherein the assay is characterised as having an ROC AUC of at least 0.806, and more preferably wherein the panel of one or more CpGs comprises at least the CpGs denoted by [[CG]];
[0713] 407. one or more CpGs within DMR 407 as defined by SEQ ID NO: 5407 denoted by CG, preferably wherein the assay is characterised as having an ROC AUC of at least 0.804, and more preferably wherein the panel of one or more CpGs comprises at least the CpGs denoted by [[CG]];
[0714] 408. one or more CpGs within DMR 408 as defined by SEQ ID NO: 5408 denoted by CG, preferably wherein the assay is characterised as having an ROC AUC of at least 0.801, and more preferably wherein the panel of one or more CpGs comprises at least the CpGs denoted by [[CG]];
[0715] 409. one or more CpGs within DMR 409 as defined by SEQ ID NO: 5409 denoted by CG, preferably wherein the assay is characterised as having an ROC AUC of at least 0.799, and more preferably wherein the panel of one or more CpGs comprises at least the CpGs denoted by [[CG]];
[0716] 410. one or more CpGs within DMR 410 as defined by SEQ ID NO: 5410 denoted by CG, preferably wherein the assay is characterised as having an ROC AUC of at least 0.798, and more preferably wherein the panel of one or more CpGs comprises at least the CpGs denoted by [[CG]];
[0717] 411. one or more CpGs within DMR 411 as defined by SEQ ID NO: 5411 denoted by CG, preferably wherein the assay is characterised as having an ROC AUC of at least 0.784, and more preferably wherein the panel of one or more CpGs comprises at least the CpGs denoted by [[CG]];
[0718] 412. one or more CpGs within DMR 412 as defined by SEQ ID NO: 5412 denoted by CG, preferably wherein the assay is characterised as having an ROC AUC of at least 0.78, and more preferably wherein the panel of one or more CpGs comprises at least the CpGs denoted by [[CG]];
[0719] 413. one or more CpGs within DMR 413 as defined by SEQ ID NO: 5413 denoted by CG, preferably wherein the assay is characterised as having an ROC AUC of at least 0.771, and more preferably wherein the panel of one or more CpGs comprises at least the CpGs denoted by [[CG]];
[0720] 414. one or more CpGs within DMR 414 as defined by SEQ ID NO: 5414 denoted by CG, preferably wherein the assay is characterised as having an ROC AUC of at least 0.768, and more preferably wherein the panel of one or more CpGs comprises at least the CpGs denoted by [[CG]];
[0721] 415. one or more CpGs within DMR 415 as defined by SEQ ID NO: 5415 denoted by CG, preferably wherein the assay is characterised as having an ROC AUC of at least 0.766, and more preferably wherein the panel of one or more CpGs comprises at least the CpGs denoted by [[CG]];
[0722] 416. one or more CpGs within DMR 416 as defined by SEQ ID NO: 5416 denoted by CG, preferably wherein the assay is characterised as having an ROC AUC of at least 0.761, and more preferably wherein the panel of one or more CpGs comprises at least the CpGs denoted by [[CG]];
[0723] 417. one or more CpGs within DMR 417 as defined by SEQ ID NO: 5417 denoted by CG, preferably wherein the assay is characterised as having an ROC AUC of at least 0.747, and more preferably wherein the panel of one or more CpGs comprises at least the CpGs denoted by [[CG]]; or
[0724] 418. one or more CpGs within DMR 418 as defined by SEQ ID NO: 5418 denoted by CG, preferably wherein the assay is characterised as having an ROC AUC of at least 0.739, and more preferably wherein the panel of one or more CpGs comprises at least the CpGs denoted by [[CG]],
   [0725] preferably wherein the assay comprises determining methylation β-values for each CpG in the panel of one or more CpGs, more preferably wherein the cancer is cervical cancer.

[0726] In any one of the assays described herein, the step of determining the methylation status of the one or more CpGs in the panel may comprise or may additionally comprise determining the methylation status of each CpG within one or more of the sequences identified by SEQ ID NOs 5703 to 5786.

[0727] In any one of the assays described herein, the step of determining the methylation status of the one or more CpGs in the panel may preferably comprise or may preferably additionally comprise determining the methylation status of each CpG within one or more of the sequences identified by SEQ ID NOs 5703, 5731, 5759, 5723, 5751, 5779, 5713, 5741, 5769, 5706, 5734, 5762, 5705, 5733 and 5761. More preferably, in any one of the assays described herein, the step of determining the methylation status of the one or more CpGs in the panel may comprise or may additionally comprise determining the methylation status of each CpG within all of the sequences identified by SEQ ID NOs 5703, 5731, 5759, 5723, 5751, 5779, 5713, 5741, 5769, 5706, 5734, 5762, 5705, 5733 and 5761.

[0728] In any one of the assays described herein, the step of determining the methylation status of the one or more CpGs in the panel may preferably comprise or may preferably additionally comprise determining the methylation status of each CpG within one or more of the sequences identified by SEQ ID NOs 5703, 5731, 5759, 5713, 5741, 5769, 5706, 5734, and 5762. More preferably, in any one of the assays described herein, the step of determining the methylation status of the one or more CpGs in the panel may comprise or may additionally comprise determining the methylation status of each CpG within all of the sequences identified by SEQ ID NOs SEQ ID NOs 5703, 5731, 5759, 5713, 5741, 5769, 5706, 5734, and 5762.

[0729] The invention also provides a variety of assays, each comprising any 1, 2, 3, 4, 5, 6, 7, 8, 9, 10 or more (or any range derivable therein) of a variety of steps and in no particular order, including methods of the following: measuring in a sample; analyzing a sample; assessing a sample; evaluating a sample; measuring nucleic acids in a sample; assessing nucleic acids in a sample; detecting nucleic acids in a sample; measuring methylation in nucleic acids in a sample; analyzing nucleic acids in a sample; assessing nucleic acids in a sample; measuring methylation at one or more CpG dinucleotides in a sample; detecting methylation at one or more CpG dinucleotides in a sample; assaying methylation at one or more CpG dinucleotides in a sample; assessing methylation at one or more CpG dinucleotides in a sample; measuring a methylation status in a sample; assaying a methylation status in a sample; detecting methylation status in a sample; determining methylation status in a sample; identifying methylation status in a sample; measuring one or more DNA methylation markers in a sample; assessing one or more DNA methylation markers in a sample; detecting one or more DNA methylation markers in a sample; measuring the presence of methylation at one or more markers in a sample; detecting the presence of methylation at one or more markers in a sample; assessing the presence of methylation at one or more markers in a sample; assaying the presence of one of more markers in a sample; measuring one or more DNA methylation markers in a sample but excluding the measuring of one or more other DNA methylation markers in the sample; assessing one or more DNA methylation markers in a sample but excluding the assessing of one or more other DNA methylation markers in the sample; analyzing one or more DNA methylation markers in a sample but excluding the analyzing of one or more other DNA methylation markers in the sample; detecting one or more DNA methylation markers in a sample but excluding the detecting of one or more other DNA methylation markers in the sample; measuring methylation status in nucleic acids from a sample from tissue from an individual other than tissue from the individual suspected of, or at risk for, being cancerous; detecting methylation status in nucleic acids from a sample from tissue from an individual other than tissue from the individual suspected of, or at risk for, being cancerous; analyzing methylation status in nucleic acids from a sample from tissue from an individual other than tissue from the individual suspected of, or at risk for, being cancerous; assessing methylation status in nucleic acids from a sample from tissue from an individual other than tissue from the individual suspected of, or at risk for, being cancerous; measuring methylation at one or more CpG dinucleotides in a sample but excluding the measuring of methylation at one or more CpG dinucleotides in the sample; assessing methylation at one or more CpG dinucleotides in a sample but excluding the assessing of methylation at one or more CpG dinucleotides in the sample; analyzing methylation at one or more CpG dinucleotides in a sample but excluding the analyzing of methylation at one or more CpG dinucleotides in the sample; detecting methylation at one or more CpG dinucleotides in a sample but excluding the detecting of methylation at one or more CpG dinucleotides in the sample; measuring methylation at one or more CpG dinucleotides in nucleic acids from a sample from tissue from an individual other than tissue from the individual suspected of, or at risk for, being cancerous; detecting methylation at one or more CpG dinucleotides in nucleic acids from a sample from tissue from an individual other than tissue from the individual suspected of, or at risk for, being cancerous; analyzing methylation at one or more CpG dinucleotides in nucleic acids from a sample from tissue from an individual other than tissue from the individual suspected of, or at risk for, being cancerous; assessing methylation at one or more CpG dinucleotides in nucleic acids from a sample from tissue from an individual other than tissue from the individual suspected of, or at risk for, being cancerous; treating an individual for cancer when the individual has been determined to have a methylation status at one or more methylation markers; treating an individual for cancer when the individual has been determined to have methylation at one or more CpG dinucleotides;
[0730] wherein any of the aforementioned methods, or any other methods encompassed by the disclosure, may comprise any one or more of the following method steps:
[0731] measuring methylation status, wherein the measuring identifies the methylation status of one or markers from nucleic acids in a sample;
[0732] measuring methylation status, wherein the measuring identifies the presence of one or more markers from nucleic acids in a sample;
[0733] measuring the presence of one or more methylation markers from a sample;
[0734] providing DNA from a sample;
[0735] providing nucleic acids from a sample;
[0736] determining whether one or more methylation markers from nucleic acids from a sample are methylated;
[0737] measuring whether one or more methylation markers from nucleic acids from a sample are methylated;
[0738] performing a sequencing step on nucleic acids from a sample;
[0739] determining a sequence of nucleic acids from a sample;
[0740] performing bisulphite conversion on one or more markers;
[0741] performing bisulphite conversion on one or more CpG dinucleotides;
[0742] hybridizing DNA to an array comprising probes capable of determining methylated versus non-methylated markers;
[0743] hybridizing DNA to an array comprising probes capable of determining methylated versus non-methylated CpG dinucleotides;
[0744] hybridizing DNA to an array comprising probes capable of discriminating between methylated and non-methylated markers;
[0745] hybridizing DNA to an array comprising probes capable of discriminating between methylated and non-methylated CpG dinucleotides;
[0746] performing an amplification step on sequence from nucleic acids from a sample;
[0747] performing an amplification step on sequence from nucleic acids using methylation-specific primers;
[0748] performing amplification of sequence comprising one or more regions suspected of having methylation or in need of determination of a methylation status;
[0749] performing PCR on sequence comprising one or more regions suspected of having methylation or in need of determination of a methylation status;
[0750] performing a capturing step;
[0751] performing a binding step;
[0752] performing a purification step;
[0753] performing a capturing step comprising binding of polynucleotides comprising one or more methylation markers to binding molecules specific to the one or more methylation markers and collecting complexes thereof;
[0754] stratifying the grade of a cancer;
[0755] determining the risk of cancer;
[0756] determining the risk of recurrence of cancer;
[0757] obtaining a sample from an individual;
[0758] obtaining DNA from a sample from an individual;
[0759] administering a treatment to an individual;
[0760] providing DNA from a sample;
[0761] determining whether one or more methylation markers from a panel of methylation markers comprises a specific sequence; and/or
[0762] obtaining data that identifies whether each one of a group of methylation markers from a panel comprises a specific sequence.

[0763] Moreover, in some aspects of the invention, an individual who is administered a therapy or treatment has been subjected to any of the methods and steps described herein.

[0764] Described herein are assays that utilise a statistically robust panel of one or more CpGs whose methylation status can be determined to provide a reliable prediction of the presence or development of CIN3 and/or cancer in an individual. By determining the methylation status of each CpG within the panel of one or more CpGs, a cancer index value may be derived thus enabling stratification of individuals according to their risk of developing CIN3 and/r cancer or of having cancer, particularly cervical and/or endometrial cancer, with statistically robust sensitivity and specificity. The skilled person would understand that the methylation status of each CpG within a panel of one or more CpGs can be determined by any suitable means in order to thereby derive the cancer index value. Any one method, or a combination of methods, may be used to determine the methylation status of each CpG within a panel of one or more CpGs.

[0765] Various exemplary methods for determining the methylation status of each CpG within a panel of one or more CpGs are described herein. For example, in one method a percent methylated reference (PMR) value of a CpG may be determined. In another method the methylation β-values of a CpG may be determined. Different mechanisms may be employed to determine specific values depending on the circumstances, such as PCR-based mechanisms or array-based mechanisms.

### Cancer Index Values as Diagnostic and Risk Assessment Tools

[0766] In any of the assays described herein, the assessment of the presence, absence or development of CIN3 and/or cancer, particularly cervical or endometrial cancer, most preferably cervical cancer, in an individual is based on the cancer index value of the individual at the time of testing.

[0767] As explained herein, using panels of the specific CpGs disclosed herein, cancer index values can be established which correspond with CIN3 and/or cancer negative samples, because they are based on values derived from individuals known to be CIN3 and/or cancer negative. Similarly, using panels of the specific CpGs disclosed herein, cancer index values can be established which correspond with CIN3 and/or cancer positive samples from individuals known to be CIN3 and/or cancer positive. A user can then apply these cancer index values to assess the presence, absence or development of CIN3 and/or cancer, particularly cervical or endometrial cancer, most preferably cervical cancer, in any test individual whose CIN3 and/or cancer status is required to be tested. As also explained herein, the assays of the invention are capable of being performed with a high degree of statistical accuracy.

[0768] As explained herein, the described assays particularly relate to the assessment of the presence, absence or development of cervical cancer and/or endometrial cancer, particularly cervical cancer.

[0769] A skilled person will readily appreciate that a cancer index value provides a value that indicates a “likelihood” or “risk” or “prediction” of any of the assays of the invention correctly assessing the presence, absence or development of CIN3 and/or cancer, particularly cervical or endometrial cancer, most preferably cervical cancer, in an individual. This because the assessment is based upon a correlation between DNA methylation profiles of tissue samples and individual disease status. Nevertheless, as demonstrated by data set out in the Examples and elsewhere herein, the assays of the invention provide such correlations with high statistical accuracy, thus providing the skilled person with a high degree of confidence that the cancer index value which is determined for any test individual whose cancer status is required to be tested will provide an accurate correlation with actual disease status for the individual.

[0770] In the context of the present invention, “likelihood”, “risk” and “prediction” may be used synonymously with each other.

[0771] Any references herein to sequences, genomic sequences and/or genomic coordinates are derived based upon Homo sapiens (human) genome assembly GRCh37 (hg19). The skilled person would understand variations in the nucleotide sequences of any given sequence, particularly DMRs 1 to 418, may exist due to sequencing errors and/or variation between individuals.

[0772] The assay of the invention represents a ‘prediction’ because any cancer index value (WID-CIN-Index) derived in accordance with the invention is unlikely to be capable of diagnosing every individual as having or not having cancer with 100% specificity and 100% sensitivity. Rather, depending on the cancer index cutpoint threshold applied by the user for positively predicting the presence of cancer in an individual, the false positive and false negative rate will vary. In other words, the inventors have discovered that the assays of the invention can achieve variable levels of sensitivity and specificity for predicting the presence, absence or development of CIN3 and/or cancer, particularly cervical or endometrial cancer, most preferably cervical cancer, as defined by receiver operating characteristics, depending on the cancer index cutpoint threshold chosen and applied by the user. Such sensitivity and specificity can be seen from the data disclosed herein to be achievable at high proportions, demonstrating accurate and statistically-significant discriminatory capability.

[0773] Similarly, cancer index values which have been pre-determined to correlate with specific cancer phenotypes, such as the presence or absence of cancer, have been defined with a high level of statistical accuracy as explained further herein.

[0774] Assessing the ‘development’ of cancer in the context of the invention may refer to assessing whether an individual is likely or unlikely to develop cancer. Cells from sampled these tissues/anatomical sites can act as a surrogate for cervical and/or endometrial cells that may transform to cancer. Assessing the development of cancer in accordance with the assays of the invention may refer to assessing an increased or decreased likelihood of CIN3 and/or cancer development, particularly cervical cancer and endometrial cancer, preferably cervical cancer. Assessing the development of cancer in accordance with the assays of the invention may refer to assessing progression or worsening of a pre-existing cancer lesion in an individual. Assessment of the development of cancer in accordance with the assays of the invention may refer to predicting the likelihood of recurrence of cancer.

[0775] In any of the assays described herein, the step of assessing the presence or development of CIN3 and/or cancer in an individual based on a cancer index value may involve the application of a threshold value. Threshold values can provide a risk-based indication of an individual's CIN3 and/or cancer status, whether that is CIN3 and/or cancer positive, or CIN3 and/or cancer negative. Threshold values can also provide a means for identifying whether the cancer index value is intermediate between a CIN3 and/or cancer positive value and a CIN3 and/or cancer negative value. As explained herein, the cancer index value may be dynamic and subject to change depending upon genetic and/or environmental factors. Accordingly, the cancer index value may provide a means for assessing and monitoring cancer development. Cancer index values may therefore indicate at least a low risk or a high risk that the individual has a CIN3 and/or cancer positive status or has a status that is indicative of the development of CIN3 and/or cancer. If the cancer index value of an individual is determined by the assays of the invention at two or more time points, an increase or decrease in the individual's cancer index value may indicate an increased or decreased risk of the individual having or developing CIN3 and/or cancer, particularly cervical and/or endometrial cancer, most preferably cervical cancer.

[0776] Throughout the disclosure herein the terms “threshold value”, “cutpoint”, and “cutpoint threshold” are to be considered synonymous and interchangeable.

[0777] As explained further herein any assay of the invention is an assay for assessing the presence, absence or development of CIN3 and/or cancer, particularly cervical or endometrial cancer, most preferably cervical cancer, in an individual. The types of cancer are set out further herein. As explained further herein, the assays of the invention provide means for assessing whether an individual is at risk of having or developing CIN3 and/or cancer based on specific cutpoint thresholds. Such risk assessments can be provided with a high degree of confidence based on the statistical parameters which characterise the assay. Thus in any of the assays described herein involving cancer index cutpoint thresholds, the cutpoint threshold may be used for risk assessment purposes. Equally, in any of the assays described herein involving cancer index cutpoint thresholds, the cutpoint threshold value may be used to specify whether or not an individual has CIN3 and/or cancer as a pure diagnostic test. Again, such diagnostic tests can be provided with a high degree of confidence based on the statistical parameters which characterise the assay. Accordingly, in any assay described herein which specifies that a cancer index value for the individual is a specific value or more, or is “about” a specific value or more, the individual may be assessed as having cancer. In any assay described herein which specifies that a cancer index value for the individual is less than a specific value, or is less than “about” a specific value, the individual may be assessed as not having cancer. The term “about” is to be understood as providing a range of +/−5% of the value.

[0778] Accordingly, any assay of the invention is an assay for assessing the presence, absence or development of CIN3 and/or cancer, particularly cervical or endometrial cancer, most preferably cervical cancer, in an individual, the assay comprising:
[0779] a. providing a sample which has been taken from the individual, the sample comprising a population of DNA molecules;
[0780] b. determining in the population of DNA molecules in the sample the methylation status of a panel of:
   [0781] (i) one or more CpGs selected from a panel of CpGs identified in SEQ ID NOs 1 to 5000 wherein the CpGs are identified at nucleotide positions 61 to 62; and/or
   [0782] (ii) one or more CpGs selected from within a panel of one or more Differentially Methylated Regions (DMRs) defined by SEQ ID NOs 5001 to 5418, wherein the CpGs are denoted by CG;
[0783] c. deriving a cancer index value based on the methylation status of the one or more CpGs in the panel; and
[0784] d. assessing the presence, absence or development of CIN3 and/or cancer, particularly cervical or endometrial cancer, most preferably cervical cancer, in the individual based on the cancer index value;
[0785] wherein the assay is characterised as having an area under the curve (AUC) of 0.60 or more as determined by receiver operating characteristics (ROC).

[0786] Any of the assays of the invention are particularly for assessing the presence or absence of CIN3 and/or cancer in an individual.

[0787] Such an assay may be performed in accordance with any of the methods disclosed and defined herein.

[0788] As explained further herein, any assay of the invention for assessing the presence, absence or development of CIN3 and/or cancer, particularly cervical or endometrial cancer, most preferably cervical cancer, in an individual may alternatively be referred to as an assay for stratifying an individual in accordance with their CIN3 and/or cancer status.

[0789] Accordingly, any assay of the invention is an assay for stratifying an individual for the presence, absence or development of CIN3 and/or cancer, particularly cervical or endometrial cancer, most preferably cervical cancer, in an individual, the assay comprising:
[0790] a. providing a sample which has been taken from the individual, the sample comprising a population of DNA molecules;
[0791] b. determining in the population of DNA molecules in the sample the methylation status of a panel of:
   [0792] (i) one or more CpGs selected from a panel of CpGs identified in SEQ ID NOs 1 to 5000 wherein the CpGs are identified at nucleotide positions 61 to 62; and/or
   [0793] (ii) one or more CpGs selected from within a panel of one or more Differentially Methylated Regions (DMRs) defined by SEQ ID NOs 5001 to 5418, wherein the CpGs are denoted by CG;
[0794] c. deriving a cancer index value based on the methylation status of the one or more CpGs in the panel; and
[0795] d. stratifying the individual for the presence, absence or development of CIN3 and/or cancer, particularly cervical or endometrial cancer, most preferably cervical cancer, based on the cancer index value;
[0796] wherein the assay is characterised as having an area under the curve (AUC) of 0.60 or more as determined by receiver operating characteristics (ROC).

[0797] Such an assay may be performed in accordance with any of the methods disclosed and defined herein.

[0798] Accordingly, any assay of the invention is an assay for stratifying an individual for CIN3 and/or cancer, the assay comprising:
[0799] a. providing a sample which has been taken from the individual, the sample comprising a population of DNA molecules;
[0800] b. determining in the population of DNA molecules in the sample the methylation status of a panel of:
   [0801] (i) one or more CpGs selected from a panel of CpGs identified in SEQ ID NOs 1 to 5000 wherein the CpGs are identified at nucleotide positions 61 to 62; and/or
   [0802] (ii) one or more CpGs selected from within a panel of one or more Differentially Methylated Regions (DMRs) defined by SEQ ID NOs 5001 to 5418, wherein the CpGs are denoted by CG;
[0803] c. deriving a cancer index value based on the methylation status of the one or more CpGs in the panel; and
[0804] d. stratifying the individual for cancer based on the cancer index value;
[0805] wherein the assay is characterised as having an area under the curve (AUC) of 0.60 or more as determined by receiver operating characteristics (ROC).

[0806] Such an assay may be performed in accordance with any of the methods disclosed and defined herein.

[0807] The cancer index value may be derived by any suitable means. Preferably, the cancer index value may be derived by assessing the methylation status of the panel of:
[0808] (i) one or more CpGs selected from a panel of CpGs identified in SEQ ID NOs 1 to 5000 wherein the CpGs are identified at nucleotide positions 61 to 62; and/or
[0809] (ii) one or more CpGs selected from within a panel of one or more Differentially Methylated Regions (DMRs) defined by SEQ ID NOs 5001 to 5418, wherein the CpGs are denoted by CG,

[0810] in a sample provided from an individual. The methylation status of the CpGs may be determined by any suitable means. For example, in any of the assays described herein the step of determining the methylation status of each CpG in the panel of one or more CpGs may comprise:
[0811] a. performing a sequencing step to determine the sequence of each CpG;
[0812] b. hybridising DNA to an array comprising probes capable of discriminating between methylated and non-methylated forms of the CpGs and applying a detection system to the array so as to determine the methylation status of each CpG; and/or
[0813] c. performing a PCR step using methylation-specific primers, wherein the methylation status of the CpG is determined by the presence or absence of a PCR product.

[0814] In any of the assays described herein the step of determining the methylation status of each CpG in the panel of one or more CpGs may comprise bisulphite converting the DNA.

[0815] The step of determining in the population of DNA molecules in the sample the methylation status of a panel of one or more CpGs may comprises determining a β value of each CpG. Deriving the cancer index value may involve providing a methylation β-value data set comprising the methylation β-values for each CpG in the panel of one or more CpGs. Additionally, or alternatively, the step of determining in the population of DNA molecules in the sample the methylation status of a panel of one or more CpGs may comprises determining a percent methylated reference value for each of the panel of one or more CpGs. Optionally deriving the cancer index value may also involve estimating the fraction of contaminating DNA within the DNA provided from a sample.

[0816] DNA may be DNA originating from a particular source organism, tissue or cell type. Preferably the contaminating DNA originates from one or more different cell types to one or more cell types of interest. A cell type of interest may particularly be an epithelial cell. In some aspects of the invention, it may be preferable to estimate the fraction of contaminating DNA after the step of providing a sample which has been take from an individual. The assays described herein may optionally involve estimating a contaminating DNA fraction within DNA in the sample by any suitable means. Preferably, the contaminating DNA fraction for the sample is estimated via any suitable bioinformatics analysis tool. A bioinformatics analysis tool that may be used to estimate a contaminating DNA fraction may be EpIDISH. As described herein, it may be desirable to estimate the fraction of contaminating DNA from the one or more cell types that are different to the one or more cell types of interest because the cancer index value used for predicting the presence or development of cancer in an individual may, in some instances, only be reliably derived from determining the methylation status of a set of CpGs from DNA of a particular cell type of interest. Particularly, methylation status beta-values may differ in the one or more cell types of interest within a sample relative to methylation status beta-values in contaminating DNA from different cell types within the same sample. Thus, the derived cancer index value may in some instances have a decreased predictive power without estimating and controlling for the contaminating DNA fraction within the DNA provided from the sample. In assays of the invention that involve estimating the fraction of contaminating DNA and accordingly controlling for said contaminating DNA, it is preferable to estimate an immune cell DNA fraction within the DNA provided from the sample. In particular assays of the invention, wherein the individual has an immune cell contamination of over 50% (i.e. wherein more than 50% of the DNA in the sample is deemed to be derived from immune cells), the assay may preferably involve controlling for the immune cell contamination by deriving the cancer index, in accordance with the invention, solely from the DNA molecules derived from epithelial cells.

[0817] Any of the assays described herein comprising a step of deriving a cancer index value based on the methylation status of the one or more CpGs in the panel may further comprise applying an algorithm to the methylation beta-value dataset to obtain the cancer index value. Preferably, in any of the assays described herein, the step of deriving the cancer index value based on the methylation status of the panel of CpGs comprises providing a methylation beta-value data set comprising the methylation beta-values for each CpG in the panel and applying an algorithm to the methylation beta-value data set to obtain the cancer index value.

[0818] In any of the assays described herein, the step of deriving the cancer index value based on the methylation status of the one or more CpGs in the panel may comprise:
[0819] a. providing a methylation β-value data set comprising the methylation β-values for each CpG in the panel;
[0820] b. providing a mathematical model capable of generating the cancer index from the methylation β-value data set; and
[0821] c. applying the mathematical model to the methylation β-value data set, thereby generating the cancer index.

[0822] In any of the assays described herein, the cancer index value may be calculated by any suitable mathematical model such as an algorithm or formula. Preferably, the cancer index value is termed Women's risk Identification for Cervical Cancer Index (WID-CIN-index) and wherein the mathematical model which is applied to the methylation β-value data set to generate the cancer index is calculated by an algorithm according to the following formula:

$$WID - CIN - index = {\sum }_{i = 1}^{n} \frac{μ - {w}_{i} {β}_{i}}{σ}$$

[0823] wherein:
[0824] 1. β₁, . . . , βₙ are methylation beta-values (between 0 and 1);
[0825] 2. w₁, . . . , w₅₀₀₀ are real valued coefficients;
[0826] 3. μ and σ are real valued parameters used to scale the index; and
[0827] 4. n refers to the number of CpGs in the set of test CpGs;
[0828] preferably wherein the cancer is endometrial cancer.

[0829] In any of the assays described herein, the WID-CIN-index algorithm applies real valued coefficients inferred by initially training on a dataset (this dataset in the exemplary embodiments of the invention described in the Examples consisted of 165 CIN3+ cases and 202 human papillomavirus positive (HPV+) controls) to fit a ridge classifier using the R package glmnet with a mixing parameter value of alpha=0 (ridge penalty) and binomial response type. Ten-fold cross-validation was used internally by the cv.glmnet function in order to determine the optimal value of the regularisation parameter lambda. The beta values from n CpGs for individual ν, β₁^{ν}, . . . , βₙ^{ν}, are used as inputs to the ridge classifier. The coefficients w₁, . . . , wₙ are obtained from the fitted model. The following quantity was computed for each individual ν in the training set:

$${x}_{v} = {\sum }_{i = 1}^{n} {w}_{i} {β}_{i}^{v}$$

[0830] Any suitable real valued coefficients may be applied to the WID-CIN-Index in any of the assays described herein.

[0831] The value of the parameters μ and σ are given by the mean and standard deviation of x_{ν} in the training dataset respectively.

[0832] Thus, any suitable μ and σ real valued parameters may be applied to the WID-CIN-index in any of the assays described herein. Any suitable training data set may be applied to the assays described herein in order to infer real valued parameters and coefficients that can subsequently be applied to the WID-CIN-index formula according to the present invention. Exemplary ways of utilising a training dataset in accordance with the present invention are further described in the ‘Statistical analyses for classifier development’ section of the Materials and Methods section of the Examples.

[0833] Exemplary μ and σ real valued parameters are provided in Table 2 for CpG subsets identified in SEQ ID NOs 1 to 5000. These real valued parameters may be applied to any of the assays described herein wherein the real parameters correspond to any one of the sets of CpGs identified in SEQ ID NOs 1 to 5000 and set out in the left hand column of Table 3.

TABLE 3
Exemplary μ and σ real valued parameters are provided in
Table 3 for CpG subsets identified in SEQ ID NOs 1 to 5000

| SEQ ID | | |
|---|---|---|
| NOs: | mu | sigma |
| 1-100 | 2.740972 | 5.738187 |
| 1-500 | 7.58544 | 7.762485 |
| 1-1000 | 5.731128 | 8.397056 |
| 1-1500 | 5.609192 | 9.469183 |
| 1-2000 | 5.498524 | 10.06744 |
| 1-2500 | 4.994593 | 9.862255 |
| 1-3000 | 5.11682 | 9.974974 |
| 1-3500 | 3.809614 | 8.180184 |
| 1-4000 | 4.352256 | 10.55814 |
| 1-4500 | 4.416423 | 9.848581 |
| 1-5000 | 4.268773 | 10.38904 |

[0834] Exemplary w₁, . . . , wₙ real value coefficients are provided below for the CpGs identified at positions 61 to 62 in SEQ ID NOs 1 to 5000. These real value coefficients may be applied to any of the assays described herein wherein the real parameters correspond to any one of the sets of CpGs identified in SEQ ID NOs 1 to 5000 wherein the 5000 real value coefficients below in turn correspond to the CpGs in turn identified at nucleotide positions 61 to 62 in SEQ ID NOs 1 to 5000. Accordingly, the listed coefficients are presented below in numerical order corresponding respectively to the CpGs identified in SEQ ID NOs 1 to 5000. Thus the first number below corresponds to SEQ ID NO 1, the second number corresponds to SEQ ID NO 2 etc. The exemplary real value coefficients are as follows:
[0835] −1.4775, −1.12307, −1.06088, 1.02708, −0.96865, −0.87277, 0.85797, 0.85533, 0.84542, −0.84206, −0.8321, −0.81011, −0.79471, 0.77851, −0.77179, −0.75927, 0.75082, −0.73863, −0.7318, 0.72738, 0.72644, −0.7134, 0.71318, 0.70257, −0.6891, −0.6883, 0.67779, −0.67584, 0.66994, −0.667, −0.6634, −0.6558, 0.65126, −0.64549, 0.64461, −0.64282, 0.63756, −0.63593, −0.63406, −0.63239, −0.62702, −0.62655, 0.62338, 0.61844, −0.61788, −0.61317, 0.60845, −0.60205, −0.59891, 0.59795, 0.5958, 0.59007, 0.58909, −0.58345, 0.58343, −0.58072, −0.57796, −0.56978, 0.56904, −0.56875, 0.56635, −0.56237, −0.55676, 0.55659, −0.55655, −0.55407, −0.55107, −0.55091, −0.55045, 0.55042, 0.54961, 0.54723, 0.54665, −0.54636, −0.54566, 0.54097, −0.53854, −0.53758, −0.53165, −0.52949, −0.52598, 0.52439, −0.52218, −0.52083, −0.51658, 0.51647, −0.51358, 0.51072, 0.51028, 0.50981, −0.50841, 0.50286, −0.50242, −0.49984, −0.49701, −0.49605, −0.49543, −0.49485, −0.49472, −0.49469, −0.49309, −0.48824, −0.48715, 0.48711, −0.48433, 0.48313, 0.48294, −0.48258, −0.48251, −0.48197, −0.48011, 0.47981, −0.47821, 0.476, −0.47481, −0.47374, 0.4733, −0.4716, 0.47091, 0.47028, 0.46854, 0.46782, −0.4677, −0.46738, 0.46548, −0.46218, −0.46142, 0.46072, 0.46064, −0.45973, 0.45913, −0.45882, −0.45805, 0.45732, 0.45726, 0.45588, 0.45555, −0.45529, 0.45168, 0.45058, 0.45051, 0.44934, −0.44906, 0.44896, −0.44841, 0.44837, −0.44764, 0.44714, −0.44601, 0.44583, 0.44535, 0.44155, −0.44058, 0.44035, 0.43869, 0.43775, −0.43757, −0.43745, 0.43701, 0.43676, 0.43551, 0.43259, 0.43171, 0.43165, −0.43081, −0.42966, 0.42941, −0.42855, −0.4283, −0.42811, −0.42726, −0.42653, 0.42533, −0.42497, −0.42227, 0.42197, 0.42112, 0.42065, −0.42017, 0.41908, −0.41877, −0.41752, 0.41744, −0.41699, −0.41692, −0.41629, −0.41507, 0.41444, −0.41419, 0.41388, 0.41252, −0.41247, −0.41095, 0.40819, 0.40749, 0.40686, 0.4068, 0.40677, −0.40377, −0.40374, −0.40252, −0.40054, 0.39925, −0.39864, −0.39699, 0.39649, −0.39624, −0.39583, −0.3953, −0.39496, −0.39482, 0.39471, −0.39437, −0.39338, −0.39292, 0.39274, 0.39259, 0.3915, −0.39145, 0.39104, −0.39039, −0.39002, −0.3891, 0.38898, −0.38861, −0.38804, 0.38715, −0.38646, 0.38602, −0.38594, 0.38586, −0.3853, −0.38497, 0.38362, −0.38354, −0.383, −0.38281, −0.38096, −0.38045, −0.38024, 0.38002, −0.37994, −0.37937, −0.37767, 0.37711, −0.3768, −0.37629, 0.37623, 0.37534, −0.37525, 0.3749, −0.37383, 0.37336, 0.37282, 0.37192, 0.37191, −0.37097, 0.37079, −0.37068, 0.37047, 0.37041, 0.37028, −0.37016, 0.36947, −0.36861, −0.36807, 0.36779, −0.36706, −0.36682, −0.36616, 0.36615, −0.36479, −0.36473, 0.36451, 0.36409, −0.3629, 0.36281, 0.36178, −0.36176, 0.36069, 0.36024, 0.35967, −0.35955, −0.35946, −0.35936, 0.35719, −0.35713, 0.35628, −0.35409, 0.35395, 0.35376, −0.35299, −0.35255, 0.3502, 0.34911, 0.34869, 0.34786, −0.34731, −0.3471, −0.34694, 0.34675, 0.34558, 0.34527, 0.34508, 0.34378, 0.34336, −0.34305, 0.34299, 0.34214, −0.34168, 0.34143, 0.34138, 0.34034, 0.34026, −0.34019, 0.33913, 0.33878, 0.33822, −0.33782, −0.33778, −0.33715, −0.33713, −0.33665, −0.33625, −0.33623, 0.33616, −0.33561, 0.33559, 0.33525, −0.33489, 0.33477, −0.33312, 0.33209, −0.33134, −0.3305, −0.33018, 0.32949, −0.32908, 0.32858, 0.32858, 0.32795, 0.3279, 0.32741, −0.32719, −0.32718, 0.32703, 0.32691, −0.32668, −0.32659, 0.32609, −0.32464, −0.3245, 0.32405, 0.32346, −0.32291, −0.32267, −0.32219, −0.32198, −0.32197, −0.32185, −0.32129, 0.32038, −0.31978, −0.31957, 0.31914, 0.31908, −0.31904, −0.31885, −0.31876, −0.31864, 0.31804, −0.31803, 0.31776, −0.31706, −0.31689, −0.31626, −0.31614, −0.31607, 0.31574, −0.31553, −0.31525, 0.31518, −0.31511, −0.31467, 0.31413, −0.31391, −0.31389, −0.3138, −0.3134, 0.31327, −0.31314, 0.313, 0.31292, −0.31269, −0.3126, 0.3125, 0.31178, −0.31143, 0.31132, 0.31075, −0.3105, −0.30969, 0.30928, 0.30863, −0.30829, 0.30777, 0.30744, −0.30664, −0.30618, −0.30603, −0.30603, −0.30568, −0.30566, 0.30496, 0.30485, 0.30471, −0.30431, −0.30418, −0.30363, −0.30298, −0.30289, −0.30286, 0.30273, −0.30251, 0.30162, −0.30149, 0.30131, 0.30105, −0.30075, −0.30067, 0.30019, 0.29954, 0.29932, −0.29929, −0.29923, 0.29811, −0.298, 0.29791, −0.29759, 0.29747, 0.29739, 0.2973, −0.29718, 0.29686, −0.29589, 0.29583, −0.29553, −0.29544, 0.29505, −0.29498, −0.29483, −0.29472, −0.29457, −0.29421, 0.29396, −0.29395, 0.29355, 0.29323, 0.29296, −0.29269, −0.29268, −0.29173, −0.29138, 0.29128, 0.29032, 0.29016, 0.28977, −0.28877, −0.28853, 0.28826, 0.28777, 0.28759, −0.28734, 0.28707, −0.28678, 0.28627, 0.28603, 0.28595, −0.28568, 0.2855, 0.28543, −0.28538, −0.28476, −0.28467, −0.28462, −0.28439, −0.28433, 0.28392, −0.28383, −0.28378, 0.28364, 0.28321, −0.283, 0.28291, 0.28291, −0.2828, −0.28264, 0.28248, −0.28148, −0.28142, 0.28123, 0.28046, −0.27976, −0.27975, 0.27962, 0.27924, 0.27877, 0.27816, 0.27801, 0.27732, −0.27667, −0.27651, 0.27644, −0.27633, 0.27626, −0.27616, 0.27613, 0.27601, −0.27591, −0.27582, −0.27574, 0.2757, −0.27471, −0.27457, 0.27455, 0.2742, −0.27409, 0.2739, −0.27333, −0.2733, −0.2727, −0.27248, −0.27213, 0.27197, −0.27158, −0.27131, 0.27111, −0.27047, −0.27002, −0.26996, 0.26988, −0.26977, 0.26976, −0.26969, −0.26927, −0.26918, 0.26906, −0.26896, 0.26894, 0.26893, −0.26874, 0.26838, −0.26817, 0.26792, −0.26742, −0.26739, −0.26736, 0.26734, −0.26717, −0.26691, −0.2669, −0.26685, −0.26616, −0.26615, 0.2657, 0.26568, −0.26561, 0.26525, 0.26501, 0.2649, −0.26476, −0.26474, −0.2644, −0.26409, 0.26401, −0.26401, −0.26387, 0.26305, −0.26301, 0.26295, −0.26295, −0.26106, 0.26057, −0.26037, 0.26031, −0.26019, 0.26018, 0.26007, 0.26005, −0.25972, −0.25953, 0.25942, 0.25928, −0.25917, 0.25907, −0.25881, −0.25871, −0.25653, −0.25617, −0.2558, −0.25502, −0.25482, −0.25463, −0.25424, −0.25354, 0.25344, −0.25343, −0.25337, −0.25329, −0.25307, 0.25303, 0.2528, 0.25258, −0.25252, 0.25248, −0.25246, −0.25235, −0.25207, 0.25206, −0.25181, 0.2515, −0.25133, 0.25108, −0.25085, −0.25074, −0.25066, −0.24994, −0.24965, −0.2493, −0.24908, −0.24901, −0.24886, −0.2488, −0.24878, −0.24871, 0.24844, 0.24828, 0.24825, 0.24819, 0.24764, 0.24751, −0.2471, 0.24671, −0.2467, −0.24664, 0.24663, −0.24645, 0.24635, −0.2462, −0.24612, −0.24593, −0.24507, −0.24467, −0.24462, −0.24458, 0.24454, 0.24454, −0.24433, 0.2441, −0.24404, 0.24394, −0.2436, −0.24355, −0.24312, 0.24305, −0.24301, 0.24291, 0.24272, −0.2423, −0.24215, −0.24205, 0.24175, 0.2416, −0.24159, −0.24157, −0.24151, −0.24151, 0.24126, −0.24104, 0.24101, −0.24076, −0.2407, 0.2406, −0.24056, −0.24049, −0.24048, −0.24047, −0.24041, 0.24018, 0.23993, −0.23982, −0.23978, 0.23968, −0.23941, −0.23941, −0.23935, 0.23905, 0.239, 0.2387, 0.2387, 0.23857, −0.23848, 0.23837, −0.23814, −0.23711, 0.23669, −0.23649, −0.236, 0.23587, −0.23577, −0.23564, −0.23535, −0.23501, −0.23488, 0.23486, 0.23477, 0.23433, −0.23431, −0.2338, −0.23367, −0.23342, 0.23336, −0.23315, −0.23311, −0.23301, 0.23296, −0.23286, 0.2323, 0.23167, −0.23131, 0.23117, 0.23117, 0.23099, −0.23075, 0.23073, −0.23058, −0.2302, 0.23008, −0.2295, −0.22933, 0.22907, −0.22902, 0.22885, 0.22856, −0.22804, 0.22789, 0.22765, −0.22761, 0.22754, 0.22747, −0.22731, −0.22692, −0.22688, −0.22685, 0.22677, −0.22671, 0.22661, −0.22657, −0.22643, 0.22624, 0.22615, −0.22437, 0.22435, 0.22427, −0.22418, −0.22359, −0.22353, −0.22348, −0.22312, −0.22307, −0.22305, 0.22292, 0.22248, −0.22216, 0.22214, 0.22207, −0.22201, 0.22193, −0.22186, −0.22183, −0.22181, 0.22158, −0.22134, 0.22115, 0.22113, −0.22105, 0.22093, 0.22071, −0.22054, 0.22022, −0.21973, 0.21951, 0.21945, −0.21912, 0.21884, −0.21884, −0.21869, −0.21846, 0.21839, 0.21838, −0.21764, −0.21759, −0.21726, −0.21702, −0.21698, 0.21684, 0.21676, 0.21594, 0.2156, −0.21528, 0.21465, −0.21463, −0.21458, −0.21452, 0.21433, 0.21425, −0.21421, 0.21409, −0.21409, 0.21388, −0.21381, 0.21374, 0.21326, −0.21295, −0.21248, 0.21247, −0.21243, 0.21226, 0.21199, −0.21155, −0.21126, 0.21111, −0.21104, −0.21089, 0.21085, −0.21033, −0.21017, 0.21004, −0.21002, 0.20997, 0.2098, −0.20947, −0.20929, 0.2091, −0.20878, −0.20868, −0.20867, 0.20858, −0.20816, −0.20789, 0.20778, −0.20747, −0.20729, 0.20688, 0.20663, −0.20637, −0.20613, −0.20563, 0.20525, −0.20497, −0.20466, 0.2046, −0.20423, 0.20422, −0.20401, −0.2039, −0.20376, 0.20364, −0.20352, −0.20349, 0.20342, −0.20341, 0.2033, 0.20289, −0.2028, 0.20266, −0.20257, 0.20238, 0.20232, −0.20211, −0.2019, −0.20182, −0.2017, 0.20091, 0.20084, −0.20071, −0.20059, −0.20024, −0.20023, 0.19954, 0.19928, 0.19908, −0.19888, 0.19771, −0.19746, −0.19718, −0.19695, −0.19692, −0.19676, −0.19663, 0.1966, −0.19632, −0.19611, 0.19603, −0.19554, 0.19543, −0.19445, −0.19445, −0.1944, 0.19424, −0.19413, −0.19411, 0.1941, 0.19409, −0.19403, 0.19373, −0.19344, −0.19336, 0.19324, −0.19321, −0.19301, −0.19288, −0.19287, −0.19283, 0.19262, 0.19256, 0.19249, 0.19219, 0.19209, 0.19195, −0.19155, −0.19122, 0.19104, 0.19088, 0.19087, −0.19079, −0.19051, −0.19039, 0.1903, −0.18996, 0.18985, 0.1898, 0.18977, −0.18972, −0.18971, −0.18946, −0.18945, −0.18939, 0.18906, 0.1889, 0.18871, −0.18867, −0.18864, −0.18824, −0.18807, −0.188, −0.18783, −0.18779, 0.18776, −0.18773, 0.18754, 0.18747, −0.18732, 0.18711, −0.18658, 0.18644, 0.18638, −0.18579, 0.18577, −0.18571, 0.18546, −0.18532, −0.1852, −0.18517, −0.18508, 0.18498, −0.18467, 0.18462, 0.1846, 0.18445, 0.18434, −0.1843, 0.18424, 0.18375, 0.18365, 0.18336, −0.18335, 0.18329, −0.18308, −0.18296, 0.18293, −0.18289, −0.18279, −0.18267, −0.18262, 0.1826, −0.18245, −0.18245, −0.18243, 0.1824, 0.18225, −0.18195, 0.18193, −0.18185, −0.18172, 0.18161, 0.18117, −0.18014, −0.1799, 0.17985, −0.17947, −0.17873, 0.17873, 0.17868, 0.17794, −0.17776, 0.17774, −0.1777, 0.17726, −0.17712, 0.17706, −0.17704, −0.17687, −0.17685, 0.17674, −0.17674, −0.17673, 0.17667, −0.17667, −0.17666, 0.17666, −0.17663, −0.17661, 0.17659, −0.17655, −0.17655, 0.17652, 0.17637, −0.1763, −0.17629, 0.17627, −0.17624, −0.17592, −0.17561, 0.17561, 0.1752, 0.17513, −0.17512, 0.17511, 0.17501, −0.17478, −0.17465, 0.17455, −0.17441, 0.17439, −0.17436, −0.17429, 0.17426, −0.17416, −0.1741, 0.17375, −0.17371, 0.17337, −0.1733, −0.17329, 0.1731, 0.17309, −0.17305, −0.17273, −0.17265, −0.17254, −0.17232, −0.17217, 0.17203, −0.17175, −0.17167, 0.17164, 0.17148, −0.17126, −0.17123, 0.17077, −0.17067, −0.17066, 0.1706, −0.17041, −0.16993, 0.16992, −0.16982, −0.16971, −0.16965, 0.16959, −0.16955, 0.16939, 0.16936, −0.16892, −0.16873, 0.1683, −0.16823, −0.16819, −0.16806, 0.168, −0.16754, −0.16752, 0.16742, 0.16727, −0.16684, 0.16678, 0.16653, 0.16633, −0.16621, 0.16598, −0.16597, 0.16566, −0.16532, 0.16526, −0.16524, −0.16521, 0.16471, 0.16461, −0.16445, 0.16442, 0.16439, −0.16438, 0.16426, −0.16403, −0.16367, −0.16362, −0.16358, 0.16306, −0.16297, −0.16295, 0.16277, −0.16277, 0.16277, 0.16276, −0.16267, −0.16257, −0.16195, −0.16195, −0.16193, −0.16192, −0.1618, 0.16172, −0.16146, 0.16106, 0.16104, 0.1606, −0.16035, −0.16, 0.15994, 0.1597, −0.15967, −0.15952, −0.15952, −0.1595, −0.15938, −0.15933, −0.15929, −0.1591, −0.15902, −0.159, 0.15898, −0.15897, 0.1588, −0.15854, 0.1585, 0.15845, −0.15842, 0.15839, 0.15837, −0.1583, −0.15829, −0.15823, −0.15778, 0.1576, −0.1573, −0.1573, 0.15707, 0.15698, 0.15694, 0.15655, −0.15606, 0.15553, −0.1555, 0.15544, −0.15539, −0.15538, −0.15534, 0.15479, −0.15474, 0.15454, −0.15447, −0.15439, 0.1543, −0.15429, −0.1542, −0.1539, 0.1538, 0.15361, 0.15353, 0.1535, −0.15339, −0.15333, −0.15295, −0.15292, −0.1529, −0.15268, 0.15266, −0.15264, −0.1524, −0.15234, 0.15226, −0.15219, −0.15204, 0.15193, −0.15192, 0.1518, 0.15175, −0.15175, −0.15151, −0.15149, −0.15118, −0.15116, −0.15115, −0.1507, −0.15064, −0.15052, −0.15037, 0.15019, −0.15014, 0.14998, −0.14984, 0.1497, −0.14969, −0.14963, −0.14952, −0.14952, 0.14945, −0.14923, −0.14906, −0.14903, 0.14873, −0.14867, 0.14861, 0.14858, 0.14803, 0.14799, −0.14784, −0.14771, −0.14768, −0.14762, −0.14739, 0.14722, −0.14704, −0.14636, 0.14606, −0.14602, −0.14573, 0.1454, −0.14525, −0.14519, −0.14519, 0.14513, −0.14491, 0.14463, −0.14462, 0.14453, 0.14436, −0.14429, 0.14423, 0.14409, 0.14395, 0.14386, 0.14382, −0.14382, −0.14351, 0.14329, 0.14319, 0.14313, −0.14308, 0.143, 0.14298, −0.14294, −0.1427, −0.14268, −0.14205, −0.14202, 0.14197, 0.14192, 0.14171, 0.14163, 0.14122, −0.14117, −0.14108, −0.14067, −0.1405, −0.14033, −0.13999, −0.13996, −0.13987, −0.13984, −0.13982, −0.13982, 0.13965, −0.13951, 0.13951, 0.13938, −0.1393, 0.13922, −0.13921, −0.13911, 0.1385, −0.13848, 0.13845, 0.13832, −0.13826, 0.13817, −0.13791, −0.13753, 0.13743, −0.1374, 0.13692, 0.13689, 0.13686, −0.13684, 0.1367, −0.13669, −0.13665, −0.13663, −0.13655, 0.13648, −0.1363, 0.13623, 0.13619, −0.13598, 0.13582, −0.13582, 0.13578, 0.13565, 0.13553, −0.13551, 0.13548, −0.13541, −0.13538, −0.13531, 0.13526, 0.13517, −0.13512, −0.13511, −0.13505, 0.13493, −0.1349, −0.13473, 0.13465, −0.13461, −0.13441, −0.13436, −0.13431, −0.13422, −0.13385, −0.1338, 0.13353, −0.13351, −0.13349, −0.1334, −0.1333, −0.13329, −0.1332, −0.13313, −0.13273, 0.13265, −0.13264, 0.13258, −0.13244, −0.13229, 0.13221, 0.13218, −0.13217, 0.13215, −0.13206, −0.13206, 0.13189, 0.13189, −0.13169, −0.13163, 0.13154, 0.13151, −0.1315, 0.13138, −0.13127, −0.13123, 0.1311, −0.13087, −0.13076, −0.13073, 0.13072, 0.13063, −0.13061, −0.1306, −0.13056, −0.13055, 0.13046, −0.13043, 0.13036, 0.12999, −0.12984, −0.12971, −0.12969, −0.12966, 0.12965, −0.12963, −0.12954, −0.12934, 0.1293, 0.1293, 0.1293, 0.12928, 0.12922, 0.12909, 0.12879, −0.12844, 0.12804, 0.12799, −0.12792, 0.12787, 0.12786, −0.12775, −0.12768, −0.12761, −0.12761, 0.12737, −0.12698, 0.12693, −0.12682, −0.12681, −0.12663, 0.12652, 0.1263, −0.1259, 0.12556, 0.12549, 0.12543, −0.12541, −0.12527, −0.12525, −0.12521, 0.12509, −0.12508, 0.12489, −0.12486, −0.12479, 0.12466, 0.12464, −0.12461, −0.12451, −0.12441, −0.12419, 0.12397, −0.12394, 0.12365, −0.12355, 0.12353, −0.12353, 0.12327, 0.12319, −0.12318, 0.12289, −0.12279, −0.12278, 0.12277, 0.12275, −0.12271, −0.12258, −0.12257, −0.12256, −0.12255, 0.1225, 0.12228, −0.12225, 0.12223, −0.12183, 0.12172, −0.12154, −0.12142, 0.12141, 0.12141, −0.12129, 0.12112, 0.12107, −0.12087, −0.12081, −0.12075, 0.12072, 0.12068, −0.12067, −0.12055, −0.12035, −0.12034, −0.12016, −0.12015, 0.12002, 0.11969, −0.11968, −0.11961, −0.11932, −0.11929, 0.1191, 0.119, −0.11892, −0.11889, 0.11874, 0.11866, −0.11865, −0.11848, −0.1183, −0.11798, −0.11788, 0.11776, 0.11773, −0.11741, 0.1173, 0.1173, −0.11727, 0.11722, −0.11719, 0.11712, 0.11704, −0.11686, −0.11672, −0.11659, 0.11638, −0.11637, 0.11636, 0.11629, −0.11615, −0.11613, −0.11606, −0.1159, −0.11585, 0.11582, −0.11563, −0.11548, −0.11544, −0.11543, −0.1154, −0.11538, 0.11522, −0.11517, 0.11507, 0.11505, −0.115, −0.11478, −0.11463, 0.11441, 0.11434, 0.11434, 0.11404, 0.114, −0.11391, 0.11359, −0.11351, 0.1135, −0.11348, 0.11346, 0.11337, 0.11336, −0.11335, 0.11313, 0.11308, −0.11271, 0.11269, 0.11261, −0.11254, 0.11248, 0.11242, 0.11231, −0.11228, −0.11217, −0.11217, −0.11214, −0.11212, −0.11195, −0.1119, 0.11185, −0.11174, −0.11152, 0.11147, 0.11144, −0.11132, 0.11115, 0.11099, −0.11099, 0.11098, 0.11091, −0.11091, 0.1108, −0.11068, −0.11066, −0.11032, −0.11031, −0.1102, −0.11007, −0.11001, −0.10992, −0.10991, 0.10989, −0.10984, −0.10976, −0.10974, 0.10963, −0.10959, −0.10948, 0.10948, 0.10947, 0.10944, −0.10938, −0.10936, 0.10917, 0.10907, 0.10897, −0.10869, −0.10866, 0.10865, −0.10864, −0.1086, −0.10835, −0.10833, −0.10818, 0.10816, 0.10813, −0.10807, 0.10804, −0.108, 0.1079, −0.1078, 0.10777, −0.10773, −0.10746, −0.1074, 0.10736, 0.10717, 0.1071, −0.10703, 0.10694, 0.10693, −0.10681, −0.1068, −0.10678, −0.10674, 0.10673, 0.10668, 0.10668, −0.10654, −0.10654, 0.10639, 0.10631, −0.10629, −0.10617, 0.10617, 0.10597, 0.10592, 0.10592, −0.10576, 0.10575, −0.10558, 0.10555, 0.10538, −0.10528, 0.10521, −0.10513, −0.10503, 0.10495, −0.10473, −0.10462, 0.10459, 0.10439, 0.10428, −0.10419, −0.10417, −0.10416, −0.10415, −0.10412, 0.10384, −0.10374, −0.1036, 0.10346, −0.10343, −0.10343, 0.10338, 0.10328, 0.10322, 0.10321, 0.10314, 0.10294, 0.10281, 0.10268, 0.10244, 0.10242, −0.10233, −0.10221, 0.10219, 0.10212, −0.10212, 0.10199, −0.10178, 0.10177, 0.10156, −0.10151, −0.10148, 0.10131, 0.10124, −0.10102, −0.10072, −0.10069, −0.10065, 0.10053, −0.10044, −0.10021, 0.10013, −0.1, −0.09999, 0.09993, −0.09992, 0.0998, −0.09953, −0.09944, 0.09941, 0.09936, −0.09936, −0.09922, −0.09915, 0.09912, −0.09911, −0.09904, 0.09902, −0.09898, 0.09894, 0.09866, −0.09862, 0.09852, −0.09844, −0.0983, 0.09822, 0.09804, 0.09802, 0.09795, −0.09784, −0.09776, −0.09775, −0.09767, −0.09759, −0.09755, 0.09751, 0.09736, 0.09729, −0.09692, −0.0969, −0.09684, 0.09666, −0.09653, −0.09635, −0.09632, 0.0963, 0.09613, −0.09609, −0.09601, −0.09598, 0.09572, 0.0957, 0.09569, 0.09552, −0.09549, −0.09545, 0.09528, −0.09518, −0.09506, 0.09495, 0.09491, −0.0949, 0.09484, 0.09484, −0.09483, 0.09471, −0.09471, 0.09461, −0.09447, −0.09444, −0.09441, −0.09441, 0.0942, 0.09417, 0.0939, −0.09376, −0.09375, 0.09375, 0.09375, 0.09373, 0.09368, −0.09349, −0.09346, −0.09308, −0.09306, 0.09302, 0.09293, −0.09288, −0.09286, −0.09282, 0.09274, −0.09273, 0.0926, −0.09257, −0.09252, −0.09247, 0.09246, −0.09244, 0.09244, 0.09243, −0.09239, −0.09227, −0.09208, −0.09206, −0.092, 0.09196, 0.09189, −0.09186, 0.09172, −0.09166, 0.09163, 0.09157, −0.09154, −0.09146, 0.09128, −0.09115, −0.09114, −0.09106, −0.09105, −0.09105, −0.09098, 0.09083, 0.09076, 0.09076, −0.09066, −0.09056, −0.09038, −0.09033, −0.09029, −0.09019, 0.09009, −0.09004, 0.08999, −0.08991, −0.08985, −0.08983, 0.08981, 0.08979, −0.08969, −0.08969, 0.08967, −0.08965, −0.08962, −0.08957, 0.08947, −0.08943, −0.08942, 0.08933, 0.08916, −0.089, −0.08888, 0.08885, −0.08882, 0.08881, −0.08867, −0.08861, 0.08843, 0.08828, 0.08797, −0.08786, −0.08783, −0.0878, 0.08767, 0.08765, −0.08762, 0.08749, 0.08727, 0.08727, −0.08723, −0.08708, −0.08701, −0.08696, 0.08694, 0.08693, 0.0868, 0.08673, 0.08658, −0.08657, 0.08656, 0.08653, 0.08639, −0.08622, −0.08606, −0.0859, −0.08579, −0.08565, −0.08565, −0.08556, 0.08526, 0.08515, 0.08513, −0.08513, 0.08504, −0.08495, −0.08494, 0.08493, 0.08491, 0.08489, 0.08477, 0.08454, −0.08443, 0.08441, 0.08433, 0.08426, 0.08426, −0.08418, 0.08417, −0.08402, −0.08401, 0.0839, −0.08373, 0.08371, −0.0836, 0.08351, −0.08351, −0.08341, −0.0834, 0.08333, 0.08332, −0.08322, −0.0832, 0.08317, 0.08316, −0.08308, −0.08307, 0.08303, −0.08302, −0.08302, −0.08295, −0.08289, 0.08281, 0.08281, −0.08277, 0.08276, −0.08262, −0.08262, 0.08261, −0.08248, −0.08243, −0.08238, 0.08223, 0.08221, −0.0822, −0.08214, −0.08207, 0.08199, 0.08198, 0.08188, −0.08181, −0.08179, −0.08175, 0.08165, −0.08164, −0.0816, −0.08155, 0.08155, −0.08154, 0.08151, 0.08137, 0.08132, 0.0813, 0.08122, 0.08118, 0.0811, 0.08106, −0.08105, −0.08099, −0.08083, 0.08067, −0.08066, 0.08062, −0.08055, −0.08043, −0.08033, −0.08024, 0.08023, −0.08022, −0.08008, −0.08006, 0.07999, 0.07993, 0.07993, −0.07991, −0.0799, 0.07983, −0.07978, −0.07975, 0.07975, −0.07974, −0.07964, −0.07963, 0.07957, 0.07953, −0.07936, −0.07934, −0.07928, −0.07914, 0.07905, −0.079, −0.07885, −0.07875, 0.07875, 0.07875, −0.0787, −0.07863, −0.07862, 0.07859, −0.0785, −0.07847, 0.07837, −0.07834, 0.07834, −0.07832, −0.07821, −0.07817, −0.07815, −0.07808, 0.07802, 0.07798, 0.07795, −0.07789, −0.07786, 0.07774, 0.07763, −0.0776, 0.07751, −0.07747, 0.07745, −0.07737, −0.07735, 0.07728, −0.07724, 0.07707, 0.077, 0.07694, −0.07674, 0.0767, −0.07646, 0.07646, 0.07635, −0.07632, 0.07627, −0.07624, 0.07624, 0.07619, −0.07614, 0.07601, −0.07594, −0.0759, −0.07587, −0.07586, 0.07579, 0.07578, 0.07569, 0.07568, −0.07564, −0.07561, 0.07559, 0.07556, −0.07548, 0.07546, 0.0754, −0.07533, −0.07527, 0.07524, −0.07515, −0.0751, 0.07508, 0.07502, −0.07493, 0.07485, −0.07475, 0.07472, −0.07465, 0.07463, −0.07447, 0.07431, 0.07417, −0.07413, −0.0741, 0.07409, 0.07407, −0.07406, 0.074, 0.07398, 0.07389, −0.07381, 0.07369, −0.07362, −0.0736, 0.07356, −0.0735, 0.0735, −0.0735, −0.07343, −0.07342, 0.0734, −0.07329, −0.07323, −0.07312, −0.07303, −0.07297, −0.07287, 0.07286, 0.07285, −0.07284, −0.07274, −0.07267, 0.07261, −0.07258, 0.07252, −0.0725, 0.07235, −0.07234, −0.07227, 0.07218, 0.07215, 0.07215, −0.07214, 0.07213, −0.07185, −0.07185, −0.07179, 0.07175, −0.07173, −0.07169, −0.07167, −0.07166, 0.07154, −0.07152, 0.07145, 0.07141, 0.07134, 0.07134, −0.07129, −0.07129, −0.07128, 0.07124, −0.07122, −0.07117, 0.07111, −0.07093, −0.07087, −0.07086, −0.07083, −0.07082, −0.07079, 0.07073, −0.07073, −0.07063, −0.07063, 0.07059, −0.07055, 0.07048, 0.07048, −0.07035, −0.07034, −0.07033, 0.07028, −0.07028, −0.07025, 0.07015, −0.07002, 0.07002, 0.06991, −0.06988, −0.06985, −0.06984, 0.06974, 0.06971, 0.06964, 0.06961, 0.06959, 0.06959, −0.06936, −0.06932, −0.0693, −0.0692, −0.06915, −0.06912, 0.06909, −0.06907, 0.06907, 0.06901, −0.06895, −0.06895, 0.06894, 0.06883, −0.06883, 0.06881, −0.06871, −0.06864, 0.06863, −0.06862, 0.06862, 0.06857, −0.06846, 0.06844, −0.06825, −0.06816, −0.06815, −0.06812, −0.0681, −0.06801, 0.06801, 0.06799, 0.06792, −0.0679, 0.06788, −0.06788, −0.06786, −0.06785, 0.06784, 0.06764, 0.06753, 0.06748, −0.06738, −0.06735, −0.06732, 0.06732, −0.06728, 0.06724, −0.06721, 0.0671, 0.06708, 0.06704, 0.06704, −0.06701, 0.06691, −0.06688, 0.06678, 0.0667, 0.06669, 0.06662, 0.06657, 0.06657, 0.06654, −0.06649, −0.06648, −0.06644, 0.06641, −0.06636, −0.06634, −0.06631, −0.06629, 0.06622, −0.06616, 0.06616, 0.06614, −0.06613, −0.06611, −0.06609, 0.06604, 0.06603, −0.06602, 0.06599, −0.06596, −0.06595, −0.06586, 0.06581, −0.06579, 0.06576, −0.06575, −0.06572, −0.06572, −0.06569, −0.06564, −0.06556, 0.06552, −0.06552, −0.06552, −0.0655, −0.06537, −0.06534, 0.06533, −0.06524, −0.06523, 0.06516, 0.06513, 0.06513, 0.06499, 0.06498, −0.06493, −0.06492, 0.06488, 0.06486, −0.06483, 0.06482, 0.06473, −0.06472, −0.0647, 0.06469, 0.06467, −0.06467, −0.06464, −0.06455, −0.06448, 0.06446, −0.06442, 0.06433, 0.0643, 0.0643, −0.06423, −0.06421, 0.06417, 0.06413, −0.06401, 0.06399, −0.06396, 0.06392, −0.0639, −0.06386, 0.06384, −0.06378, 0.06376, −0.06365, −0.06359, 0.06351, 0.06347, −0.06342, 0.0633, 0.06329, −0.06327, −0.06322, 0.06322, 0.06317, −0.06307, −0.0628, 0.06276, −0.06276, −0.06273, 0.06269, −0.06265, 0.06255, 0.06249, 0.06246, −0.06244, −0.06239, −0.06237, −0.06232, −0.06219, −0.06218, −0.06208, −0.06203, −0.06201, 0.06184, 0.06172, −0.06172, −0.0617, 0.06169, 0.06169, 0.06158, −0.06156, 0.06149, −0.06147, 0.06141, 0.06136, 0.06135, 0.0613, 0.06129, 0.06129, 0.06129, −0.06127, −0.06123, 0.06114, 0.06112, −0.06111, 0.06111, 0.06109, 0.06106, −0.06104, −0.06103, −0.061, 0.06099, 0.06098, −0.06092, −0.06091, 0.06083, 0.0608, 0.06075, 0.06074, 0.06069, −0.06069, 0.06067, 0.06057, −0.06057, 0.06054, 0.06053, −0.06049, −0.06032, 0.06028, −0.06023, −0.06019, −0.06018, −0.06016, −0.06015, 0.06004, −0.06002, 0.06002, −0.05998, −0.05998, −0.05996, −0.05991, 0.05989, −0.05989, −0.05985, −0.05985, −0.05985, −0.05983, −0.05969, −0.05968, 0.05966, 0.0596, −0.05952, −0.05948, −0.05939, 0.05936, 0.05935, 0.05928, 0.05924, −0.05911, −0.05907, −0.05904, 0.05901, 0.05895, 0.05892, −0.0587, −0.05866, −0.05862, −0.05859, 0.05843, 0.05842, −0.05836, −0.05835, −0.05834, −0.05832, −0.05829, 0.05825, −0.05822, 0.05822, 0.05821, 0.05819, −0.05818, 0.05817, −0.05813, 0.0581, −0.05808, −0.05798, 0.05792, −0.05784, 0.0578, −0.05779, −0.05776, 0.05773, 0.05772, −0.05765, −0.05762, −0.05761, −0.05759, −0.05751, 0.05748, 0.05747, −0.05742, −0.05736, −0.05734, 0.05732, −0.05731, −0.05731, −0.0573, −0.05724, −0.05721, −0.05721, −0.0572, −0.05717, 0.05707, −0.05702, 0.05698, −0.05695, 0.05693, −0.05674, −0.05665, −0.05658, −0.05655, −0.05654, 0.05645, −0.05644, −0.05643, 0.05641, −0.05636, −0.05628, −0.05627, 0.0562, −0.05617, 0.0561, −0.05609, −0.05609, 0.05608, −0.05605, 0.05603, −0.05603, 0.05599, 0.05597, 0.0559, 0.05588, −0.05586, −0.05584, −0.05581, −0.05574, 0.05573, −0.05566, −0.05564, −0.05559, 0.05555, 0.05554, −0.05553, 0.05543, 0.05542, 0.05535, 0.05533, 0.05531, −0.05527, 0.05521, −0.05515, −0.05509, −0.05485, −0.05479, −0.0547, 0.05469, 0.0546, 0.05459, −0.05458, 0.05458, 0.05452, 0.05449, −0.05446, 0.05439, −0.0543, −0.05428, 0.05427, −0.05426, −0.05424, −0.05422, 0.05421, −0.05415, −0.05414, 0.05413, 0.0541, −0.05409, 0.05399, 0.05385, −0.05383, 0.05381, −0.05378, −0.05374, −0.05372, 0.05371, 0.05363, −0.05361, −0.05354, 0.05348, −0.05345, −0.05344, 0.05344, 0.05343, −0.05338, 0.05331, −0.05331, −0.05326, −0.05322, −0.05322, −0.0531, 0.05309, 0.05307, −0.05296, −0.05296, 0.05293, 0.0529, −0.0529, 0.0529, 0.05283, −0.05283, 0.05274, 0.05268, −0.05264, −0.05259, −0.05258, 0.05257, −0.05255, −0.05253, −0.05253, −0.05249, 0.05234, 0.0523, −0.05214, 0.05214, −0.05212, 0.05208, 0.05201, −0.05201, 0.05198, 0.05193, −0.05191, −0.05189, 0.05186, 0.05185, 0.0518, −0.0518, 0.05176, 0.05176, 0.05172, −0.05169, −0.05167, −0.05167, −0.05156, 0.05153, 0.05149, 0.05147, 0.05143, −0.05143, 0.05139, 0.05137, −0.05121, −0.05119, 0.05117, 0.05116, −0.05116, −0.05116, 0.05108, 0.05107, 0.05106, −0.05099, −0.05096, 0.05093, −0.0509, 0.05087, −0.05087, −0.05085, 0.05078, 0.05076, −0.05075, −0.05074, −0.0507, −0.05067, −0.05065, 0.05057, 0.05054, 0.05051, −0.05049, −0.05049, −0.05048, −0.05038, −0.05037, 0.05034, 0.05032, −0.05023, 0.05021, −0.05019, 0.05013, 0.05012, −0.05011, −0.05007, 0.05005, 0.05002, 0.04987, 0.04987, −0.04985, −0.04985, −0.04983, 0.04981, 0.04979, 0.04979, −0.04976, 0.04974, 0.04969, 0.04967, −0.04966, −0.04961, 0.0496, −0.04957, 0.04957, 0.0495, −0.0495, −0.04943, 0.04943, 0.04937, 0.04936, 0.04934, −0.04932, 0.04932, −0.04931, 0.04927, 0.04922, −0.04922, 0.04921, −0.04919, −0.04918, −0.04918, −0.04912, −0.0491, −0.04907, 0.04903, 0.04903, 0.049, −0.04893, 0.04888, 0.04888, 0.04881, 0.0488, −0.0488, 0.04879, −0.04879, 0.04875, −0.04868, −0.04862, 0.04857, −0.0485, 0.04847, −0.04846, 0.04846, −0.04842, 0.04839, 0.04833, −0.04831, 0.04829, 0.04828, 0.04825, −0.04822, −0.04822, 0.04816, −0.04815, −0.04815, −0.04814, −0.04813, −0.04811, −0.04808, −0.04803, 0.04797, 0.04796, −0.04792, 0.0479, 0.04787, 0.04787, 0.04786, −0.04772, −0.04769, 0.04758, −0.04758, −0.04754, 0.04753, −0.04746, −0.04733, −0.04732, 0.0473, 0.04727, −0.04726, −0.047, −0.04694, 0.04691, 0.0469, 0.04688, −0.04683, −0.04682, 0.04675, −0.04671, −0.04663, −0.04661, 0.0466, −0.04656, 0.04656, −0.04655, 0.04652, 0.04647, −0.04646, 0.04646, 0.04642, 0.0464, −0.04613, 0.04609, −0.04608, −0.04606, 0.04606, 0.04603, 0.046, −0.046, 0.04597, 0.04597, −0.04594, −0.04593, −0.04593, −0.04591, −0.04591, −0.04588, −0.04588, −0.04578, −0.04576, 0.04575, −0.04575, −0.04572, 0.04566, −0.04564, −0.04561, 0.04553, −0.04547, 0.04546, 0.04546, 0.04546, −0.04545, 0.04541, −0.04528, 0.04509, 0.04507, −0.04506, −0.04505, −0.04502, 0.04502, 0.04501, 0.04498, 0.04498, −0.04496, 0.04496, 0.04495, 0.04489, 0.04479, −0.04477, −0.04475, −0.04473, 0.04472, 0.04468, 0.04466, −0.04466, −0.04464, −0.0446, 0.04459, 0.04459, 0.04441, 0.04441, 0.04439, −0.04438, −0.04437, −0.04435, −0.04434, 0.04433, 0.04431, 0.04431, 0.0443, 0.04427, −0.04423, 0.04417, 0.04417, 0.04415, −0.04415, −0.04414, −0.04413, −0.04411, −0.04407, −0.04407, 0.04407, −0.044, 0.04397, 0.04395, −0.04394, 0.04393, 0.04392, −0.0439, 0.0439, 0.04387, 0.04385, 0.04382, 0.04377, 0.04371, −0.04371, 0.04369, −0.04369, −0.04362, 0.04353, 0.0435, −0.04339, 0.04339, 0.04336, −0.04332, −0.0433, −0.04328, −0.04321, 0.04321, −0.0432, 0.04317, −0.04316, 0.04312, −0.04309, 0.04303, 0.043, 0.04298, −0.04296, 0.04295, 0.04294, 0.04292, −0.04292, −0.04287, −0.04284, 0.04281, −0.04276, 0.0427, −0.04262, −0.04262, 0.04257, −0.04254, −0.04254, 0.04253, −0.04246, 0.04243, 0.04243, 0.0424, −0.04239, −0.04237, −0.04237, 0.04236, −0.04235, −0.04235, −0.0423, 0.04225, −0.04223, −0.04216, 0.04215, −0.04212, −0.0421, 0.04209, 0.04203, −0.04201, 0.042, −0.042, −0.04196, −0.04193, 0.04193, 0.04191, −0.04186, −0.04186, −0.04183, 0.04182, −0.04181, 0.04178, −0.04172, −0.04169, 0.04169, −0.04163, −0.04161, 0.04147, −0.04147, −0.04142, 0.04138, 0.04132, 0.0413, −0.04126, 0.04126, −0.04125, −0.0412, −0.04119, −0.04116, 0.04114, 0.04113, −0.0411, 0.04106, 0.04105, −0.04104, 0.04101, −0.04101, −0.04098, −0.04096, −0.04087, −0.04087, 0.04086, −0.04086, 0.0408, −0.04079, 0.04078, −0.04076, 0.04076, 0.04069, 0.04068, −0.04066, −0.04065, 0.04062, 0.0406, 0.04058, 0.04056, 0.04055, 0.04054, −0.04051, 0.0405, −0.04048, −0.04048, −0.04045, 0.04044, −0.04035, 0.0403, −0.04027, 0.04027, −0.04023, −0.04023, 0.04022, 0.04022, −0.04019, −0.04017, 0.04014, 0.04012, −0.04003, −0.03998, 0.03991, 0.03983, 0.03981, 0.03977, −0.03976, 0.03976, −0.03974, 0.03973, −0.03971, 0.03967, 0.03965, −0.03962, −0.0396, −0.03958, −0.03957, 0.03956, −0.03956, −0.03952, −0.03952, −0.03951, −0.0395, −0.0395, 0.03947, −0.03941, 0.03939, −0.03931, −0.03929, 0.03928, 0.03926, −0.03925, −0.03922, −0.03921, 0.03919, 0.03918, −0.03917, 0.03906, 0.03906, −0.03889, −0.03887, −0.03886, −0.03886, −0.03885, −0.03885, 0.0388, 0.03877, −0.03876, 0.03876, −0.03875, −0.03871, −0.03868, 0.03866, −0.03859, 0.03859, 0.03858, −0.03851, −0.03848, −0.03843, −0.03841, 0.03841, 0.03841, 0.03833, −0.03832, −0.03832, −0.03831, −0.03826, 0.03821, −0.0382, 0.03816, 0.0381, 0.0381, −0.03808, 0.03808, −0.03806, 0.03805, −0.03804, −0.03803, −0.03803, −0.03802, −0.03796, −0.03781, 0.03774, −0.03773, 0.03765, 0.03763, −0.03763, −0.03763, −0.03752, −0.0375, 0.0375, 0.03749, −0.03749, 0.03746, 0.03741, −0.03739, −0.03739, −0.03737, −0.03733, −0.03733, 0.03722, −0.03719, −0.03716, −0.03715, 0.03711, 0.03698, −0.03697, 0.03697, −0.03693, 0.03692, 0.03691, −0.03688, 0.03687, 0.03685, −0.0368, −0.03674, 0.03673, 0.03672, 0.03669, 0.03664, 0.03664, 0.03663, −0.03655, 0.03651, 0.03645, 0.03644, −0.03641, 0.03638, 0.03633, 0.03632, −0.03626, −0.03622, −0.03618, −0.03617, 0.03615, −0.03615, 0.03606, 0.03604, 0.03599, 0.03598, −0.03593, −0.0359, 0.0359, 0.03588, 0.03587, −0.03587, −0.03581, −0.0358, 0.0358, −0.03572, 0.0357, −0.03569, −0.03568, 0.03564, −0.03563, −0.03561, −0.03561, 0.03561, −0.0356, −0.0356, −0.03555, −0.03554, 0.0355, 0.03547, −0.03546, 0.03541, −0.03533, 0.03531, 0.03531, 0.03529, 0.03528, −0.03528, −0.03528, 0.03528, −0.03522, −0.03519, −0.03518, −0.03518, −0.03515, 0.03506, 0.03504, 0.03502, −0.03494, 0.03489, −0.03488, 0.03484, 0.03481, 0.0348, −0.0348, −0.03479, 0.03476, −0.03475, −0.03473, −0.03471, −0.03469, 0.03467, 0.0346, 0.03456, −0.0345, −0.03447, 0.03446, −0.03442, 0.03441, −0.0344, −0.03438, 0.03433, 0.03431, −0.03428, −0.03427, −0.03425, −0.03422, −0.03421, 0.03421, 0.03415, 0.03414, −0.03413, 0.03411, −0.03411, 0.03408, 0.03407, 0.03407, −0.03406, −0.03405, 0.03402, −0.034, 0.03396, 0.03395, 0.03395, −0.03394, −0.03393, −0.03393, −0.03392, 0.03391, −0.03389, 0.03389, −0.03386, 0.03382, −0.03382, −0.03381, 0.0338, 0.0338, 0.03379, −0.03372, −0.03371, −0.0337, 0.03363, −0.03363, −0.03362, −0.03362, 0.0336, −0.0336, 0.0336, 0.03359, 0.03359, −0.03356, −0.03354, 0.03353, −0.03351, 0.03348, −0.03347, 0.03346, 0.03346, −0.03344, 0.03343, −0.03342, 0.03335, 0.03327, 0.0332, 0.03316, −0.03316, −0.03315, 0.03315, −0.03313, −0.03313, 0.03305, 0.03302, 0.03299, −0.03296, −0.03293, 0.03291, −0.03291, 0.0329, −0.03289, 0.03289, −0.03289, 0.03288, 0.03286, 0.03284, 0.03283, 0.03278, 0.03275, 0.03273, 0.0327, 0.03266, −0.03264, −0.03262, 0.03262, 0.03261, −0.03261, 0.03257, 0.03254, −0.03253, −0.03252, 0.0324, −0.0324, 0.03237, −0.03229, −0.03226, 0.03225, −0.03224, 0.03224, −0.03221, −0.03219, −0.03217, −0.03212, 0.03211, −0.0321, −0.03206, −0.03204, 0.03202, 0.03201, 0.032, 0.032, 0.03189, −0.03188, 0.03184, 0.03184, 0.03183, −0.03181, 0.0318, 0.03178, −0.03174, −0.03173, 0.0317, −0.0317, 0.0317, 0.03167, 0.03166, 0.03166, −0.03163, −0.03159, −0.03159, 0.03158, −0.03157, 0.03153, −0.03149, −0.03144, −0.0313, −0.03126, 0.03125, −0.03123, −0.0312, 0.03114, −0.03113, 0.0311, −0.03107, −0.03105, 0.03099, −0.03098, 0.03096, −0.03086, 0.03085, 0.03081, 0.03078, −0.03076, 0.03075, 0.03075, 0.03072, 0.03067, −0.03059, −0.03059, −0.03058, 0.0305, 0.03048, −0.03048, 0.03045, −0.03045, −0.03044, −0.0304, 0.03037, −0.03031, −0.03027, −0.03027, 0.03022, 0.03019, −0.03012, 0.03011, 0.03004, 0.03, 0.02998, 0.02996, −0.02996, 0.02994, −0.02994, −0.02992, 0.0299, 0.0299, 0.02984, 0.02982, 0.0298, −0.02979, −0.02974, 0.02972, −0.02969, 0.02969, −0.02968, −0.02968, −0.02968, −0.02967, 0.02964, 0.02964, −0.02959, 0.02955, −0.02955, 0.02954, 0.02947, −0.02945, −0.02939, −0.02937, 0.02937, 0.02934, 0.02933, 0.0293, 0.02926, −0.02926, −0.02923, −0.02921, 0.0292, −0.02918, −0.02917, 0.02915, −0.02914, −0.02914, 0.02913, −0.02912, 0.02911, −0.0291, 0.02909, 0.02903, −0.02902, 0.02902, −0.02899, 0.02895, 0.02888, 0.02888, −0.02887, −0.02885, 0.02882, 0.0288, −0.02876, 0.02875, −0.02866, 0.02863, −0.02861, −0.02861, −0.02861, −0.02859, −0.02856, −0.0285, −0.02846, 0.02844, −0.02843, 0.0284, −0.02839, 0.02836, −0.02832, 0.02832, −0.0283, 0.02829, 0.02828, 0.02826, −0.02824, 0.02822, −0.0282, 0.02816, 0.02815, 0.02815, −0.02809, 0.02808, 0.02808, 0.02807, −0.02804, 0.028, 0.02795, 0.02794, −0.02793, −0.02788, −0.02785, −0.02785, 0.02784, −0.02784, −0.02782, 0.02781, −0.0278, 0.02779, 0.02778, 0.02776, 0.02774, 0.02773, −0.02771, −0.02771, −0.02766, 0.02765, 0.02764, 0.02758, 0.02757, −0.02753, −0.02752, −0.02747, 0.02746, 0.02742, −0.02736, −0.02735, −0.02735, −0.02734, −0.02731, −0.02727, 0.02721, 0.02721, 0.0272, −0.02719, 0.02719, −0.02714, 0.02709, −0.02708, −0.02705, 0.027, 0.02699, −0.02698, 0.02695, −0.02695, −0.02689, −0.02688, −0.02688, −0.02685, −0.02683, −0.0268, 0.02678, −0.02677, −0.02677, 0.02675, −0.02675, −0.02672, 0.02669, −0.02669, −0.02668, 0.02668, 0.02666, −0.02666, −0.02664, −0.02663, 0.02661, −0.02659, 0.02657, 0.02657, 0.02656, −0.0265, −0.02642, −0.02641, −0.02631, 0.0263, 0.02629, −0.02625, 0.02625, −0.02624, −0.02624, −0.02622, 0.0262, 0.02617, −0.02614, 0.02613, 0.02611, 0.02606, −0.02606, 0.02596, 0.02594, −0.02592, 0.02592, 0.02591, 0.0259, −0.02586, 0.02581, 0.02581, 0.02578, 0.02574, 0.02574, 0.02572, 0.02569, −0.02565, 0.02564, 0.02563, 0.02563, 0.02561, 0.02558, −0.02555, 0.02553, −0.02548, −0.02547, −0.02547, −0.02541, −0.02529, 0.02521, −0.02521, −0.0252, 0.0252, 0.02515, 0.02513, −0.02513, 0.02512, 0.02512, 0.02511, −0.02508, 0.02507, 0.02506, −0.02506, −0.02505, −0.02504, −0.02503, −0.02501, −0.02496, −0.02494, −0.02491, 0.02488, 0.02488, −0.02486, −0.02483, −0.02483, −0.02481, −0.02481, −0.02479, −0.02478, 0.02478, −0.02476, −0.02476, 0.02475, −0.02473, −0.02469, 0.02461, 0.02461, −0.02461, 0.02461, 0.02457, 0.02456, 0.02455, 0.02454, −0.02452, 0.02446, −0.02444, −0.02443, 0.02442, −0.0244, 0.02439, −0.02436, 0.02435, −0.02433, 0.02433, −0.02427, 0.02425, −0.02421, −0.02419, −0.02416, −0.0241, 0.02409, −0.02403, 0.02401, 0.02399, 0.02398, −0.02397, −0.02393, 0.0239, −0.02389, −0.0238, 0.02379, 0.02375, −0.02375, 0.02373, 0.02367, −0.02363, −0.02363, −0.0236, −0.0236, 0.02359, 0.02353, 0.02352, −0.02351, −0.02349, 0.02347, −0.02345, 0.02344, −0.02343, 0.02341, 0.02339, −0.02339, −0.02338, 0.02338, 0.02337, 0.02336, −0.02332, −0.02331, −0.02327, 0.02326, −0.02324, −0.02317, 0.02306, 0.02305, −0.02305, −0.02305, −0.02302, 0.02302, 0.02297, 0.02297, 0.02296, 0.02296, −0.0229, 0.02286, −0.02286, 0.02286, 0.02285, 0.02283, 0.02282, 0.0228, −0.02279, 0.02278, 0.02277, −0.02276, −0.02274, −0.02273, 0.02271, 0.0227, −0.02269, −0.02266, −0.02266, −0.02264, −0.02264, −0.02259, −0.02256, 0.02256, 0.02254, 0.02252, −0.02252, −0.0225, −0.02248, 0.02246, −0.02245, −0.02243, −0.02241, 0.0224, −0.02238, 0.02237, −0.02236, −0.02236, 0.02232, 0.02231, −0.02228, 0.02226, 0.02225, −0.02221, 0.0222, −0.02217, 0.02215, −0.0221, 0.0221, 0.0221, 0.02209, −0.02208, −0.02202, −0.02198, −0.02197, −0.02195, 0.02194, 0.02192, 0.0219, −0.0219, 0.02186, −0.02186, −0.02185, −0.02184, 0.02183, −0.02183, −0.02181, −0.02179, −0.02179, −0.02176, −0.02175, −0.02174, 0.02174, 0.02172, 0.02171, −0.02169, 0.02169, −0.02167, −0.02167, −0.02166, −0.02166, −0.02164, −0.02163, 0.02162, −0.02162, −0.02161, 0.02157, −0.02156, −0.02155, 0.02154, 0.0215, 0.02149, 0.02149, −0.02146, 0.02145, 0.02144, −0.02139, −0.02137, 0.02135, 0.02134, −0.02129, 0.02112, −0.02109, −0.02109, 0.02108, −0.02104, 0.02102, 0.02095, −0.02093, −0.02087, 0.02087, −0.02082, −0.02081, −0.0208, −0.02078, −0.02078, 0.02076, 0.02071, 0.0207, 0.02068, 0.02067, −0.02062, 0.02061, −0.0206, −0.02056, −0.02056, −0.02053, 0.02051, −0.02049, 0.02042, −0.02041, 0.02041, 0.0204, −0.02037, 0.02035, −0.02035, 0.02035, 0.02034, 0.02032, 0.0203, −0.0203, 0.02028, 0.02028, 0.02026, −0.02026, 0.02024, 0.02024, 0.02019, 0.02011, −0.02011, 0.02011, −0.02011, 0.0201, 0.0201, −0.02008, 0.02006, −0.02005, −0.02004, −0.02003, 0.02002, 0.02002, −0.02001, 0.01999, 0.01998, 0.01996, 0.01996, −0.01993, 0.01992, 0.01991, −0.01991, −0.01984, −0.01981, −0.0198, 0.0198, 0.01979, 0.01977, 0.01974, 0.01968, −0.01964, 0.01964, 0.01963, −0.01963, 0.01962, −0.0196, −0.0196, −0.0196, −0.01958, 0.01957, 0.01954, 0.01945, −0.01944, 0.01944, 0.01938, 0.01936, −0.01935, 0.01933, 0.01931, 0.01929, 0.01924, 0.01924, −0.01916, 0.01914, 0.01911, −0.0191, 0.01909, 0.01906, 0.01901, 0.01901, 0.019, −0.01899, −0.01896, −0.01892, 0.01891, 0.01888, −0.01886, 0.01885, 0.01881, 0.01879, 0.01877, −0.01874, −0.01873, 0.01873, 0.01868, 0.01868, 0.01867, 0.01863, 0.01862, 0.0186, 0.01859, −0.01857, −0.01852, −0.01851, 0.01849, 0.01846, −0.01846, −0.0184, 0.01837, −0.01837, 0.01836, −0.01836, 0.01832, 0.0183, −0.01828, −0.01828, −0.01827, −0.01825, −0.01824, −0.01822, 0.01812, 0.01809, −0.01809, −0.01807, −0.01805, −0.01805, 0.01805, −0.01804, −0.01804, 0.01804, −0.01803, −0.01801, 0.01795, −0.01793, 0.01793, −0.01792, −0.01791, 0.01789, 0.01784, −0.01784, 0.01777, 0.01773, 0.01773, 0.0177, 0.01769, 0.01766, 0.01763, −0.01761, −0.0176, −0.01758, −0.01756, −0.01754, 0.01753, −0.01748, −0.01748, 0.01748, −0.01744, −0.01743, −0.01742, −0.01741, −0.01738, 0.01738, 0.01737, −0.01735, 0.01735, −0.01729, −0.01728, −0.01723, 0.01722, 0.01722, 0.01721, 0.01719, −0.01719, −0.01718, −0.01717, 0.01717, 0.01715, 0.01714, 0.01714, 0.01713, 0.01711, −0.01711, −0.0171, −0.0171, −0.01708, −0.01706, 0.01706, −0.01701, 0.017, −0.017, −0.01696, 0.01696, 0.01694, −0.01693, 0.01689, −0.01687, 0.01684, −0.01682, −0.01679, 0.0167, 0.01669, −0.01668, −0.01667, −0.01666, 0.01664, −0.01661, −0.01658, 0.01656, −0.01656, 0.01651, 0.0165, −0.01649, −0.01649, 0.01649, −0.01648, −0.01648, 0.01646, −0.01645, 0.01641, 0.01638, −0.01638, −0.01638, −0.01635, −0.01631, 0.01629, 0.01626, −0.01626, −0.01625, 0.01625, −0.01624, −0.01624, 0.01624, 0.01619, 0.01616, 0.01611, 0.0161, −0.0161, −0.01608, −0.01605, 0.01603, 0.01602, 0.01601, −0.016, −0.01597, −0.01596, −0.01595, −0.01587, −0.01586, 0.01585, −0.01585, −0.01584, −0.01581, 0.01581, −0.01579, −0.01578, 0.01571, −0.0157, 0.0157, −0.01569, 0.01562, 0.01562, −0.01562, 0.01561, 0.01557, 0.01552, −0.01551, −0.01548, 0.01547, −0.01544, 0.01542, −0.01542, 0.01542, −0.01539, −0.01536, −0.01536, −0.01534, −0.01534, 0.01533, 0.01531, 0.01529, −0.01529, −0.01527, 0.01525, −0.0152, 0.0152, −0.01519, 0.01516, 0.01514, 0.01512, −0.01509, −0.01508, −0.01501, 0.015, −0.01499, 0.01499, −0.01498, −0.01498, −0.01497, −0.01496, −0.01496, −0.01494, −0.01494, −0.01493, 0.01492, 0.0149, −0.01486, 0.01483, −0.01482, 0.01478, 0.01476, 0.01475, 0.01475, 0.01474, −0.01473, 0.01472, −0.01471, 0.01462, 0.01461, −0.01461, 0.01456, −0.01456, −0.01451, −0.01451, 0.0145, −0.01447, 0.01446, −0.01443, −0.01442, 0.0144, 0.01438, 0.01434, −0.01434, 0.01432, −0.0143, −0.01421, −0.01418, 0.01418, −0.01418, 0.01418, −0.01417, 0.01413, 0.01412, 0.01411, −0.0141, 0.0141, 0.01407, 0.01406, 0.01403, 0.01397, −0.01395, 0.01394, −0.01393, −0.01389, −0.01386, 0.01384, −0.01384, 0.01382, −0.0138, −0.0138, −0.01379, 0.01379, −0.01379, −0.01378, −0.01376, −0.01375, 0.01374, −0.01367, 0.01367, 0.01364, −0.01362, 0.01358, −0.01357, −0.01357, −0.01355, −0.01355, 0.01353, −0.01351, 0.01351, −0.01347, 0.01344, 0.01342, −0.01342, −0.01341, 0.01341, −0.01339, −0.01334, 0.01333, −0.01328, −0.01327, −0.01327, 0.01325, 0.01323, −0.01322, −0.01317, −0.01317, −0.01313, 0.01312, −0.0131, 0.01308, −0.01306, −0.01306, −0.01302, 0.013, 0.01299, −0.01299, 0.01298, −0.01297, 0.01296, −0.01294, −0.01293, −0.0129, −0.01285, 0.01282, −0.01281, −0.0128, 0.01275, −0.01273, −0.01272, 0.0127, −0.0127, 0.01268, −0.01268, 0.01267, −0.01266, 0.01264, 0.01264, −0.01263, 0.01261, 0.01259, 0.01259, −0.01258, 0.01258, 0.01254, −0.01253, 0.01248, −0.01248, 0.01248, −0.01247, −0.01246, −0.01243, −0.01242, −0.01241, −0.01239, 0.01238, 0.01238, 0.01237, −0.01235, 0.01235, −0.01235, 0.01231, 0.0123, 0.01229, −0.01229, −0.01225, −0.01225, 0.01224, −0.01224, 0.01224, 0.01223, 0.01222, 0.01218, −0.01217, 0.01217, −0.01214, 0.01213, −0.01213, 0.01212, 0.01212, −0.01206, 0.01206, −0.01206, 0.01205, −0.01203, 0.01203, 0.01202, 0.01198, 0.01191, −0.01191, 0.0119, 0.0119, 0.01186, −0.01184, 0.01184, 0.0118, 0.0118, −0.01176, 0.01174, −0.01173, −0.01171, 0.01169, −0.01169, 0.01163, 0.01163, 0.01162, −0.0116, 0.01155, 0.01155, 0.01151, 0.0115, 0.01148, 0.01145, −0.01143, −0.01143, 0.0114, −0.01138, 0.01138, −0.01137, 0.01135, −0.01134, −0.01133, −0.01131, −0.01131, −0.01131, −0.01127, 0.01127, 0.01127, 0.01127, 0.01124, 0.01123, −0.01121, 0.0112, −0.01116, −0.01114, −0.01113, −0.01111, 0.01111, −0.01106, −0.01106, 0.01105, −0.01103, −0.01102, −0.01102, −0.011, −0.01098, −0.01097, 0.01096, −0.01092, −0.01091, −0.0109, −0.01088, −0.01087, −0.01086, 0.01083, −0.01073, −0.01072, 0.01069, −0.01068, −0.01064, 0.01064, 0.0106, −0.01059, 0.01058, −0.01055, 0.01055, −0.01055, −0.01054, 0.01051, 0.01051, −0.01045, 0.01045, −0.01044, 0.01043, 0.01041, −0.01039, 0.01038, −0.01036, 0.01036, −0.01035, −0.01033, 0.01031, −0.01029, 0.01029, −0.01028, −0.01026, 0.01024, 0.01023, 0.01022, −0.01021, 0.01021, −0.01019, −0.01018, 0.01016, 0.01014, −0.01014, −0.01013, 0.01011, 0.0101, −0.0101, −0.01002, −0.01001, 0.01, −0.00998, 0.00994, −0.00994, −0.00992, −0.00992, 0.00982, 0.00979, −0.00978, −0.00976, 0.00976, 0.00975, 0.00975, −0.00973, 0.00973, 0.00972, 0.0097, 0.0097, −0.00967, 0.00963, −0.00962, −0.00961, 0.00958, 0.00955, −0.00952, 0.00952, 0.00948, −0.00948, 0.00944, 0.00943, 0.00942, 0.0094, 0.00939, −0.00938, 0.00938, −0.00935, −0.00935, 0.00935, 0.00933, −0.00932, 0.00932, −0.0093, 0.00929, 0.00926, −0.00926, −0.00924, −0.0092, 0.0092, 0.00914, 0.0091, −0.00902, −0.009, −0.00899, −0.00895, 0.00894, 0.00893, −0.00892, 0.00892, −0.00891, −0.00891, 0.0089, 0.00889, −0.00888, 0.00887, 0.00887, −0.00884, −0.00881, 0.0088, −0.0088, −0.0088, −0.00878, −0.00872, −0.00871, −0.0087, 0.0087, 0.00868, 0.00866, −0.00866, 0.00865, 0.00865, 0.00864, −0.00862, −0.00858, 0.00857, −0.00856, 0.00855, 0.00854, 0.00853, −0.00852, −0.00851, 0.00847, −0.00846, −0.00846, 0.00845, 0.00841, −0.00837, −0.00836, 0.00834, 0.00834, 0.00833, −0.00832, −0.00832, 0.00822, 0.0082, 0.0082, 0.0082, −0.00819, 0.00817, −0.00817, −0.00816, 0.00815, −0.00814, 0.00813, −0.00813, −0.00812, −0.008, −0.00798, 0.00796, −0.00795, 0.00794, 0.00794, −0.00789, 0.00787, 0.00785, 0.00779, −0.00778, 0.00775, −0.00774, 0.0077, −0.00769, 0.00769, −0.00768, 0.00767, −0.00766, 0.00762, 0.00761, −0.00754, 0.00753, 0.00753, −0.00751, −0.0075, 0.00749, −0.00744, −0.00741, −0.00739, 0.00735, −0.00732, −0.0073, −0.0073, 0.00729, −0.00728, −0.00725, 0.00725, 0.00723, −0.00721, 0.00718, 0.00716, −0.00714, 0.00712, −0.00711, 0.00708, 0.00708, −0.00703, 0.00703, 0.007, 0.00696, 0.00696, 0.00693, 0.00692, 0.00689, −0.00687, 0.00683, −0.00683, 0.0068, −0.0068, 0.00679, −0.00677, 0.00675, −0.00672, −0.0067, 0.00669, 0.00669, 0.00669, 0.00669, 0.00669, −0.00669, −0.00667, −0.00667, −0.00662, −0.00661, 0.00658, −0.00655, 0.00655, 0.00652, −0.00647, 0.00647, 0.00645, −0.00644, 0.00644, −0.00644, −0.00641, −0.0064, −0.00639, −0.00636, 0.0063, −0.00629, −0.00626, −0.00623, −0.00617, −0.00617, 0.00616, −0.00615, −0.00614, 0.00613, 0.00613, −0.00611, −0.00609, −0.00609, −0.00609, −0.00605, −0.00605, 0.00603, −0.00599, −0.00599, 0.00596, −0.0059, 0.00588, −0.00587, −0.00587, −0.00586, −0.00585, 0.00584, 0.00581, −0.00579, −0.00577, −0.00573, 0.00573, −0.00573, 0.00571, −0.0057, 0.0057, 0.0057, −0.00568, −0.00567, −0.00562, −0.00553, 0.00553, −0.00553, 0.00552, 0.00549, −0.00547, 0.00545, 0.00544, −0.00543, −0.00541, −0.00541, −0.0054, −0.00539, −0.00539, −0.00538, 0.00535, −0.00535, −0.00534, −0.00532, 0.0053, −0.00529, −0.00526, −0.00526, 0.00525, −0.00523, −0.00522, −0.00521, −0.00521, −0.0052, −0.00519, −0.00519, −0.00517, 0.00514, −0.00512, −0.00511, −0.0051, −0.0051, −0.00507, −0.00503, 0.00499, 0.00498, 0.00498, 0.00495, −0.00493, −0.00491, −0.0049, −0.00489, 0.00487, 0.00485, 0.00485, 0.00484, 0.00482, −0.00482, −0.00481, −0.00479, −0.00476, −0.00474, 0.00471, 0.00469, −0.00466, 0.00465, 0.00464, 0.00463, −0.00461, −0.0046, −0.00459, −0.00458, 0.00457, −0.00457, 0.00456, 0.00446, −0.00445, 0.00443, −0.00443, 0.00443, −0.00442, 0.00439, −0.00432, −0.00432, −0.0043, −0.00427, 0.00427, 0.00424, −0.00423, 0.00421, 0.00418, −0.00415, 0.00414, −0.00412, 0.00409, 0.00407, 0.00407, −0.00406, 0.00405, −0.00403, 0.00403, −0.00403, −0.00399, 0.00397, 0.00395, −0.00392, −0.00391, 0.0039, 0.0039, 0.00389, 0.00388, 0.00383, −0.0038, −0.0038, −0.00378, −0.00375, 0.00374, −0.00373, 0.00373, 0.00371, −0.00368, 0.00361, 0.0036, 0.00358, 0.00357, −0.00357, −0.00352, 0.00352, −0.00351, 0.00347, −0.00347, −0.00347, −0.0034, −0.00338, −0.00338, 0.00331, 0.00325, 0.00323, 0.00322, 0.00321, −0.00316, 0.00316, −0.00315, −0.00315, −0.00314, −0.0031, 0.00309, 0.00307, −0.00305, −0.00301, −0.003, −0.00299, 0.00299, 0.00296, −0.00295, −0.00294, 0.00293, −0.00291, −0.00291, 0.00289, −0.00289, −0.00287, 0.00287, 0.00287, −0.00285, −0.00284, −0.00282, −0.00266, −0.00265, 0.00263, −0.00262, 0.00261, −0.0026, −0.0026, −0.00258, 0.00255, −0.00255, −0.00251, −0.0025, 0.00249, −0.00248, 0.00247, 0.00237, 0.00236, 0.00236, −0.00233, 0.00231, −0.0023, −0.00229, −0.00228, 0.00223, 0.00222, 0.0022, 0.00219, 0.00217, 0.00214, 0.0021, −0.00208, −0.00208, −0.00207, 0.00206, −0.00203, −0.00202, −0.00201, −0.002, 0.002, 0.0019, 0.00188, −0.00186, 0.00184, 0.0018, −0.00178, −0.00175, 0.00172, −0.00172, 0.0017, −0.00168, −0.00164, −0.00162, 0.00162, 0.00155, −0.00155, −0.00151, 0.00148, 0.00148, −0.00148, −0.00148, −0.00147, −0.00144, 0.00144, 0.00144, −0.00142, −0.00141, 0.0014, 0.00139, −0.00136, 0.00134, 0.00134, 0.00133, −0.00132, −0.00128, −0.00126, −0.00123, 0.00123, −0.00121, −0.0012, 0.00118, 0.00116, −0.00113, 0.00113, 0.00112, 0.00111, −0.00109, 0.00108, 0.00107, −0.00107, 0.00106, −0.00105, 0.00104, 0.00101, 0.00097, 0.00096, −0.00083, 0.00081, 0.00077, −0.00073, −0.00069, 0.00068, 0.00068, 0.00065, −0.00065, −0.00063, 0.00062, 0.00059, −0.00059, 0.00058, 0.00057, 0.00057, −0.00054, 0.00053, 0.00051, 0.00051, 5.00E-04, −0.00048, 0.00045, −0.00045, 0.00041, 4.00E-04, −0.00039, 0.00038, −0.00038, −0.00038, −0.00036, −0.00036, −0.00033, −0.00031, −0.00029, 0.00025, 0.00019, −0.00019, −0.00018, −0.00014, 0.00011, 5.00E-05, −3.00E-05, −3.00E-05, −3.00E-05, and −1.00E-05.

[0836] The predicting the presence, absence or development of CIN3 and/or cancer, particularly cervical or endometrial cancer, most preferably cervical cancer, in an individual may particularly involve a threshold cancer index value being applied in order to assess or stratify an individual has having or not having cancer or of having a high or low risk of CIN3 and/or cancer development.

[0837] The assays of the invention may involve a threshold index being applied in order to assess the presence or absence of CIN3 and/or cancer in an individual. The assessment may be characterised by receiver operating characteristics, particularly and area under the curve (AUC), sensitivity, and specificity, indicative of the reliability of the threshold being applied in order to assess the presence or absence of CIN3 and/or cancer in an individual.

[0838] In any of the assays described herein, wherein when the cancer index value for the individual is about −0.331 or more, the individual is assessed as having cancer and/or CIN3, or as having a risk of cancer and/or CIN3 development, particularly cervical or endometrial cancer, most preferably cervical cancer, in an individual is based on the WID-CIN-Index. The panel of one or more CpGs used to derive the cancer index value may comprise:
[0839] a. at least 500 of the CpGs identified at nucleotide positions 61 to 62 in SEQ ID NOs 1 to 5000, and wherein the sensitivity is at least 87% and the specificity is at least 49%;
[0840] b. at least the CpGs defined by SEQ ID NOs 1 to 500 and identified at nucleotide positions 61 to 62, and wherein the sensitivity is at least 86% and specificity is at least 77%;
[0841] c. at least the CpGs defined by SEQ ID NOs 1 to 1000 and identified at nucleotide positions 61 to 62, and wherein the sensitivity is at least 87% and specificity is at least 77%;
[0842] d. at least the CpGs defined by SEQ ID NOs 1 to 1500 and identified at nucleotide positions 61 to 62, and wherein the sensitivity is at least 89% and specificity is at least 76%.

[0843] In any of the assays described herein, wherein when the cancer index value for the individual is about −0.331 or more, the individual is assessed as having cancer and/or CIN3 or as having a high risk of cancer and/or CIN3 development, or wherein when the cancer index value for the individual is less than about −0.331 the individual is assessed as not having cancer and/or CIN3 or as having a low risk of cancer development and/or CIN3, particularly cervical or endometrial cancer, most preferably cervical cancer, in an individual is based on the WID-CIN-Index. The panel of one or more CpGs used to derive the cancer index value may comprise:
[0844] 1. at least 500 of the CpGs identified at nucleotide positions 61 to 62 in SEQ ID NOs 1 to 5000, and wherein the sensitivity is at least 87% and the specificity is at least 49%;
[0845] 2. at least 1000 of the CpGs identified at nucleotide positions 61 to 62 in SEQ ID NOs 1 to 5000, and wherein the sensitivity is at least 86% and specificity is at least 49%;
[0846] 3. at least 1500 of the CpGs identified at nucleotide positions 61 to 62 in SEQ ID NOs 1 to 5000, and wherein the sensitivity is at least 90% and specificity is at least 51%;
[0847] 4. at least 2000 of the CpGs identified at nucleotide positions 61 to 62 in SEQ ID NOs 1 to 5000, and wherein the sensitivity is at least 89% and specificity is at least 51%;
[0848] 5. at least 2500 of the CpGs identified at nucleotide positions 61 to 62 in SEQ ID NOs 1 to 5000, and wherein the sensitivity is at least 89% and specificity is at least 53%;
[0849] 6. at least 3000 of the CpGs identified at nucleotide positions 61 to 62 in SEQ ID NOs 1 to 5000, and wherein the sensitivity is at least 87% and specificity is at least 52%;
[0850] 7. at least 3500 of the CpGs identified at nucleotide positions 61 to 62 in SEQ ID NOs 1 to 5000, and wherein the sensitivity is at least 87% and specificity is at least 52%;
[0851] 8. at least 4000 of the CpGs identified at nucleotide positions 61 to 62 in SEQ ID NOs 1 to 5000, and wherein the sensitivity is at least 86% and specificity is at least 57%;
[0852] 9. at least 4500 of the CpGs identified at nucleotide positions 61 to 62 in SEQ ID NOs 1 to 5000, and wherein the sensitivity is at least 86% and specificity is at least 66%;
[0853] 10. at least 4900 of the CpGs identified at nucleotide positions 61 to 62 in SEQ ID NOs 1 to 5000, and wherein the sensitivity is at least 90% and specificity is at least 75%; or
[0854] 11. at least 5000 of the CpGs identified at nucleotide positions 61 to 62 in SEQ ID NOs 1 to 5000, and wherein the sensitivity is at least 90% and specificity is at least 75%.

[0855] In any of the assays described herein, wherein when the cancer index value for the individual is about −0.311 or more, the individual is assessed as having cancer and/or CIN3 or as having a high risk of cancer and/or CIN3 development, or wherein when the cancer index value for the individual is less than about −0.311, the individual is assessed as not having cancer and/or CIN3 or as having a low risk of cancer development and/or CIN3, particularly cervical or endometrial cancer, most preferably cervical cancer, in an individual is based on the WID-CIN-Index. The panel of one or more CpGs used to derive the cancer index value may comprise:
[0856] 1. at least the CpGs defined by SEQ ID NOs 1 to 500 and identified at nucleotide positions 61 to 62, and wherein the sensitivity is at least 86% and specificity is at least 77%;
[0857] 2. at least the CpGs defined by SEQ ID NOs 501 to 1000 and identified at nucleotide positions 61 to 62, and wherein the sensitivity is at least 84% and specificity is at least 77%;
[0858] 3. at least the CpGs defined by SEQ ID NOs 1001 to 1500 and identified at nucleotide positions 61 to 62, and wherein the sensitivity is at least 86% and specificity is at least 68%;
[0859] 4. at least the CpGs defined by SEQ ID NOs 1501 to 2000 and identified at nucleotide positions 61 to 62, and wherein the sensitivity is at least 86% and specificity is at least 60%;
[0860] 5. at least the CpGs defined by SEQ ID NOs 2001 to 2500 and identified at nucleotide positions 61 to 62, and wherein the sensitivity is at least 90% and specificity is at least 61%;
[0861] 6. at least the CpGs defined by SEQ ID NOs 2501 to 3000 and identified at nucleotide positions 61 to 62, and wherein the sensitivity is at least 86% and specificity is at least 55%;
[0862] 7. at least the CpGs defined by SEQ ID NOs 3001 to 3500 and identified at nucleotide positions 61 to 62, and wherein the sensitivity is at least 86% and specificity is at least 52%;
[0863] 8. at least the CpGs defined by SEQ ID NOs 3501 to 4000 and identified at nucleotide positions 61 to 62, and wherein the sensitivity is at least 86% and specificity is at least 53%;
[0864] 9. at least the CpGs defined by SEQ ID NOs 4001 to 4500 and identified at nucleotide positions 61 to 62, and wherein the sensitivity is at least 87% and specificity is at least 51%;
[0865] 10. at least the CpGs defined by SEQ ID NOs 4501 to 5000 and identified at nucleotide positions 61 to 62, and wherein the sensitivity is at least 87% and specificity is at least 49%;
[0866] 11. at least the CpGs defined by SEQ ID NOs 1 to 100 and identified at nucleotide positions 61 to 62, and wherein the sensitivity is at least 86% and specificity is at least 77%;
[0867] 12. at least the CpGs defined by SEQ ID NOs 1 to 500 and identified at nucleotide positions 61 to 62, and wherein the sensitivity is at least 86% and specificity is at least 77%;
[0868] 13. at least the CpGs defined by SEQ ID NOs 1 to 1000 and identified at nucleotide positions 61 to 62, and wherein the sensitivity is at least 87% and specificity is at least 77%;
[0869] 14. at least the CpGs defined by SEQ ID NOs 1 to 1500 and identified at nucleotide positions 61 to 62, and wherein the sensitivity is at least 89% and specificity is at least 76%;
[0870] 15. at least the CpGs defined by SEQ ID NOs 1 to 2000 and identified at nucleotide positions 61 to 62, and wherein the sensitivity is at least 89% and specificity is at least 76%;
[0871] 16. at least the CpGs defined by SEQ ID NOs 1 to 2500 and identified at nucleotide positions 61 to 62, and wherein the sensitivity is at least 90% and specificity is at least 75%;
[0872] 17. at least the CpGs defined by SEQ ID NOs 1 to 3000 and identified at nucleotide positions 61 to 62, and wherein the sensitivity is at least 90% and specificity is at least 73%;
[0873] 18. at least the CpGs defined by SEQ ID NOs 1 to 3500 and identified at nucleotide positions 61 to 62, and wherein the sensitivity is at least 90% and specificity is at least 73%;
[0874] 19. at least the CpGs defined by SEQ ID NOs 1 to 4000 and identified at nucleotide positions 61 to 62, and wherein the sensitivity is at least 90% and specificity is at least 76%;
[0875] 20. at least the CpGs defined by SEQ ID NOs 1 to 4500 and identified at nucleotide positions 61 to 62, and wherein the sensitivity is at least 90% and specificity is at least 74%;
[0876] 21. at least the CpGs defined by SEQ ID NOs 1 to 5000 and identified at nucleotide positions 61 to 62, and wherein the sensitivity is at least 90% and specificity is at least 75%;
[0877] 22. at least the CpGs defined by SEQ ID NOs 4501 to 5000 and identified at nucleotide positions 61 to 62, and wherein the sensitivity is at least 87% and specificity is at least 49%;
[0878] 23. at least the CpGs defined by SEQ ID NOs 4001 to 5000 and identified at nucleotide positions 61 to 62, and wherein the sensitivity is at least 86% and specificity is at least 49%;
[0879] 24. at least the CpGs defined by SEQ ID NOs 3501 to 5000 and identified at nucleotide positions 61 to 62, and wherein the sensitivity is at least 90% and specificity is at least 51%;
[0880] 25. at least the CpGs defined by SEQ ID NOs 3001 to 5000 and identified at nucleotide positions 61 to 62, and wherein the sensitivity is at least 89% and specificity is at least 51%;
[0881] 26. at least the CpGs defined by SEQ ID NOs 2501 to 5000 and identified at nucleotide positions 61 to 62, and wherein the sensitivity is at least 89% and specificity is at least 53%;
[0882] 27. at least the CpGs defined by SEQ ID NOs 2001 to 5000 and identified at nucleotide positions 61 to 62, and wherein the sensitivity is at least 87% and specificity is at least 52%;
[0883] 28. at least the CpGs defined by SEQ ID NOs 1501 to 5000 and identified at nucleotide positions 61 to 62, and wherein the sensitivity is at least 87% and specificity is at least 52%;
[0884] 29. at least the CpGs defined by SEQ ID NOs 1001 to 5000 and identified at nucleotide positions 61 to 62, and wherein the sensitivity is at least 86% and specificity is at least 57%;
[0885] 30. at least the CpGs defined by SEQ ID NOs 501 to 5000 and identified at nucleotide positions 61 to 62, and wherein the sensitivity is at least 86% and specificity is at least 66%;
[0886] 31. at least the CpGs defined by SEQ ID NOs 101 to 5000 and identified at nucleotide positions 61 to 62, and wherein the sensitivity is at least 90% and specificity is at least 75%; or
[0887] 32. at least the CpGs defined by SEQ ID NOs 1 to 5000 and identified at nucleotide positions 61 to 62, and wherein the sensitivity is at least 90% and specificity is at least 75%.

[0888] In any of the described assays, the methylation status of the one or more CpGs in the panel is preferably determined by a β-value analysis, and the assay is for assessing the presence, absence or development of CIN3 and/or cancer, preferably the cancer is cervical cancer or endometrial cancer. Most preferably, the cancer is cervical cancer.

[0889] In any of the assays described herein, wherein when the cancer index value for the individual is about −0.167 or more, the individual is assessed as having cancer and/or CIN3, or as having a risk of cancer and/or CIN3 development, or wherein when the cancer index value for the individual is less than about −0.167, the individual is assessed as not having cancer and/or CIN3 or as having a low risk of cancer development and/or CIN3, particularly cervical or endometrial cancer, most preferably cervical cancer, in an individual is based on the WID-CIN-Index. The panel of one or more CpGs used to derive the cancer index value may comprise:
[0890] a. at least 500 of the CpGs identified at nucleotide positions 61 to 62 in SEQ ID NOs 1 to 5000, and wherein the sensitivity is at least 80% and the specificity is at least 61%;
[0891] b. at least the CpGs defined by SEQ ID NOs 1 to 500 and identified at nucleotide positions 61 to 62, and wherein the sensitivity is at least 77% and specificity is at least 90%;
[0892] c. at least the CpGs defined by SEQ ID NOs 1 to 1000 and identified at nucleotide positions 61 to 62, and wherein the sensitivity is at least 72% and specificity is at least 89%;
[0893] d. at least the CpGs defined by SEQ ID NOs 1 to 1500 and identified at nucleotide positions 61 to 62, and wherein the sensitivity is at least 78% and specificity is at least 91%.

[0894] In any of the assays described herein, wherein when the cancer index value for the individual is about −0.167 or more, the individual is assessed as having cancer and/or CIN3 or as having a high risk of cancer and/or CIN3 development, or wherein when the cancer index value for the individual is less than about −0.167, the individual is assessed as not having cancer and/or CIN3 or as having a low risk of cancer development and/or CIN3, particularly cervical or endometrial cancer, most preferably cervical cancer, in an individual is based on the WID-CIN-Index. The panel of one or more CpGs used to derive the cancer index value may comprise:
[0895] 1. at least 500 of the CpGs identified at nucleotide positions 61 to 62 in SEQ ID NOs 1 to 5000, and wherein the sensitivity is at least 80% and the specificity is at least 61%;
[0896] 2. at least 1000 of the CpGs identified at nucleotide positions 61 to 62 in SEQ ID NOs 1 to 5000, and wherein the sensitivity is at least 79% and specificity is at least 59%;
[0897] 3. at least 1500 of the CpGs identified at nucleotide positions 61 to 62 in SEQ ID NOs 1 to 5000, and wherein the sensitivity is at least 79% and specificity is at least 60%;
[0898] 4. at least 2000 of the CpGs identified at nucleotide positions 61 to 62 in SEQ ID NOs 1 to 5000, and wherein the sensitivity is at least 80% and specificity is at least 60%;
[0899] 5. at least 2500 of the CpGs identified at nucleotide positions 61 to 62 in SEQ ID NOs 1 to 5000, and wherein the sensitivity is at least 79% and specificity is at least 63%;
[0900] 6. at least 3000 of the CpGs identified at nucleotide positions 61 to 62 in SEQ ID NOs 1 to 5000, and wherein the sensitivity is at least 79% and specificity is at least 65%;
[0901] 7. at least 3500 of the CpGs identified at nucleotide positions 61 to 62 in SEQ ID NOs 1 to 5000, and wherein the sensitivity is at least 76% and specificity is at least 81%;
[0902] 8. at least 4000 of the CpGs identified at nucleotide positions 61 to 62 in SEQ ID NOs 1 to 5000, and wherein the sensitivity is at least 80% and specificity is at least 70%;
[0903] 9. at least 4500 of the CpGs identified at nucleotide positions 61 to 62 in SEQ ID NOs 1 to 5000, and wherein the sensitivity is at least 76% and specificity is at least 81%;
[0904] 10. at least 4900 of the CpGs identified at nucleotide positions 61 to 62 in SEQ ID NOs 1 to 5000, and wherein the sensitivity is at least 74% and specificity is at least 90%; or
[0905] 11. at least 5000 of the CpGs identified at nucleotide positions 61 to 62 in SEQ ID NOs 1 to 5000, and wherein the sensitivity is at least 78% and specificity is at least 89%.

[0906] In any of the assays described herein, wherein when the cancer index value for the individual is about −0.167 or more, the individual is assessed as having cancer and/or CIN3, or as having a risk of cancer and/or CIN3 development, or wherein when the cancer index value for the individual is less than about −0.167, the individual is assessed as not having cancer and/or CIN3 or as having a low risk of cancer development and/or CIN3, particularly cervical or endometrial cancer, most preferably cervical cancer, in an individual is based on the WID-CIN-Index. The panel of one or more CpGs used to derive the cancer index value may comprise:
[0907] 1. at least the CpGs defined by SEQ ID NOs 1 to 500 and identified at nucleotide positions 61 to 62, and wherein the sensitivity is at least 77% and specificity is at least 90%;
[0908] 2. at least the CpGs defined by SEQ ID NOs 501 to 1000 and identified at nucleotide positions 61 to 62, and wherein the sensitivity is at least 64% and specificity is at least 92%;
[0909] 3. at least the CpGs defined by SEQ ID NOs 1001 to 1500 and identified at nucleotide positions 61 to 62, and wherein the sensitivity is at least 76% and specificity is at least 85%;
[0910] 4. at least the CpGs defined by SEQ ID NOs 1501 to 2000 and identified at nucleotide positions 61 to 62, and wherein the sensitivity is at least 82% and specificity is at least 76%;
[0911] 5. at least the CpGs defined by SEQ ID NOs 2001 to 2500 and identified at nucleotide positions 61 to 62, and wherein the sensitivity is at least 79% and specificity is at least 77%;
[0912] 6. at least the CpGs defined by SEQ ID NOs 2501 to 3000 and identified at nucleotide positions 61 to 62, and wherein the sensitivity is at least 80% and specificity is at least 70%;
[0913] 7. at least the CpGs defined by SEQ ID NOs 3001 to 3500 and identified at nucleotide positions 61 to 62, and wherein the sensitivity is at least 82% and specificity is at least 67%;
[0914] 8. at least the CpGs defined by SEQ ID NOs 3501 to 4000 and identified at nucleotide positions 61 to 62, and wherein the sensitivity is at least 84% and specificity is at least 62%;
[0915] 9. at least the CpGs defined by SEQ ID NOs 4001 to 4500 and identified at nucleotide positions 61 to 62, and wherein the sensitivity is at least 77% and specificity is at least 61%;
[0916] 10. at least the CpGs defined by SEQ ID NOs 4501 to 5000 and identified at nucleotide positions 61 to 62, and wherein the sensitivity is at least 80% and specificity is at least 61%;
[0917] 11. at least the CpGs defined by SEQ ID NOs 1 to 100 and identified at nucleotide positions 61 to 62, and wherein the sensitivity is at least 75% and specificity is at least 86%;
[0918] 12. at least the CpGs defined by SEQ ID NOs 1 to 500 and identified at nucleotide positions 61 to 62, and wherein the sensitivity is at least 77% and specificity is at least 90%;
[0919] 13. at least the CpGs defined by SEQ ID NOs 1 to 1000 and identified at nucleotide positions 61 to 62, and wherein the sensitivity is at least 72% and specificity is at least 89%;
[0920] 14. at least the CpGs defined by SEQ ID NOs 1 to 1500 and identified at nucleotide positions 61 to 62, and wherein the sensitivity is at least 78% and specificity is at least 91%;
[0921] 15. at least the CpGs defined by SEQ ID NOs 1 to 2000 and identified at nucleotide positions 61 to 62, and wherein the sensitivity is at least 79% and specificity is at least 90%;
[0922] 16. at least the CpGs defined by SEQ ID NOs 1 to 2500 and identified at nucleotide positions 61 to 62, and wherein the sensitivity is at least 80% and specificity is at least 89%;
[0923] 17. at least the CpGs defined by SEQ ID NOs 1 to 3000 and identified at nucleotide positions 61 to 62, and wherein the sensitivity is at least 80% and specificity is at least 89%;
[0924] 18. at least the CpGs defined by SEQ ID NOs 1 to 3500 and identified at nucleotide positions 61 to 62, and wherein the sensitivity is at least 80% and specificity is at least 89%;
[0925] 19. at least the CpGs defined by SEQ ID NOs 1 to 4000 and identified at nucleotide positions 61 to 62, and wherein the sensitivity is at least 78% and specificity is at least 90%;
[0926] 20. at least the CpGs defined by SEQ ID NOs 1 to 4500 and identified at nucleotide positions 61 to 62, and wherein the sensitivity is at least 80% and specificity is at least 89%;
[0927] 21. at least the CpGs defined by SEQ ID NOs 1 to 5000 and identified at nucleotide positions 61 to 62, and wherein the sensitivity is at least 78% and specificity is at least 89%;
[0928] 22. at least the CpGs defined by SEQ ID NOs 4501 to 5000 and identified at nucleotide positions 61 to 62, and wherein the sensitivity is at least 80% and specificity is at least 61%;
[0929] 23. at least the CpGs defined by SEQ ID NOs 4001 to 5000 and identified at nucleotide positions 61 to 62, and wherein the sensitivity is at least 79% and specificity is at least 59%;
[0930] 24. at least the CpGs defined by SEQ ID NOs 3501 to 5000 and identified at nucleotide positions 61 to 62, and wherein the sensitivity is at least 79% and specificity is at least 60%;
[0931] 25. at least the CpGs defined by SEQ ID NOs 3001 to 5000 and identified at nucleotide positions 61 to 62, and wherein the sensitivity is at least 80% and specificity is at least 60%;
[0932] 26. at least the CpGs defined by SEQ ID NOs 2501 to 5000 and identified at nucleotide positions 61 to 62, and wherein the sensitivity is at least 79% and specificity is at least 63%;
[0933] 27. at least the CpGs defined by SEQ ID NOs 2001 to 5000 and identified at nucleotide positions 61 to 62, and wherein the sensitivity is at least 79% and specificity is at least 65%;
[0934] 28. at least the CpGs defined by SEQ ID NOs 1501 to 5000 and identified at nucleotide positions 61 to 62, and wherein the sensitivity is at least 80% and specificity is at least 66%;
[0935] 29. at least the CpGs defined by SEQ ID NOs 1001 to 5000 and identified at nucleotide positions 61 to 62, and wherein the sensitivity is at least 80% and specificity is at least 70%;
[0936] 30. at least the CpGs defined by SEQ ID NOs 501 to 5000 and identified at nucleotide positions 61 to 62, and wherein the sensitivity is at least 76% and specificity is at least 81%;
[0937] 31. at least the CpGs defined by SEQ ID NOs 101 to 5000 and identified at nucleotide positions 61 to 62, and wherein the sensitivity is at least 74% and specificity is at least 90%; or
[0938] 32. at least the CpGs defined by SEQ ID NOs 1 to 5000 and identified at nucleotide positions 61 to 62, and wherein the sensitivity is at least 78% and specificity is at least 89%.

[0939] In any of the described assays, the methylation status of the one or more CpGs in the panel is preferably determined by a β-value analysis, and the assay is for assessing the presence, absence or development of CIN3 and/or cancer, preferably the cancer is cervical cancer or endometrial cancer. Most preferably, the cancer is cervical cancer.

[0940] In any of the described assays, the methylation status of the one or more CpGs in the panel is preferably determined by a β-value analysis, and the assay is for assessing the presence, absence or development of CIN3 and/or cancer, preferably the cancer is cervical cancer or endometrial cancer. Most preferably, the cancer is cervical cancer.

[0941] The ROC data set out in Tables 4, 5 and 6 corresponding to each specified panel of SEQ ID NOs: 1 to 5000 are derived by determining a cancer index value from said panel.

TABLE 4

| | AUC | | | | |
|---|---|---|---|---|---|
| CpG subset | (internal | Sensitivity | Specificity | Sensitivity | Specificity |
| (SEQ ID NO) | validation) | (q = −0.167) | (q = −0.167) | (q = −0.331) | (q = −0.331) |
| 1-500 | 0.92 | 0.77 | 0.9 | 0.86 | 0.77 |
| 501-1000 | 0.9 | 0.64 | 0.92 | 0.84 | 0.77 |
| 1001-1500 | 0.88 | 0.76 | 0.85 | 0.86 | 0.68 |
| 1501-2000 | 0.86 | 0.82 | 0.76 | 0.86 | 0.6 |
| 2001-2500 | 0.86 | 0.79 | 0.77 | 0.9 | 0.61 |
| 2501-3000 | 0.83 | 0.8 | 0.7 | 0.86 | 0.55 |
| 3001-3500 | 0.82 | 0.82 | 0.67 | 0.86 | 0.52 |
| 3501-4000 | 0.82 | 0.84 | 0.62 | 0.86 | 0.53 |
| 4001-4500 | 0.8 | 0.77 | 0.61 | 0.87 | 0.51 |
| 4501-5000 | 0.81 | 0.8 | 0.61 | 0.87 | 0.49 |

TABLE 5

| CpG subset | AUC (internal | Sensitivity | Specificity | Sensitivity | Specificity |
|---|---|---|---|---|---|
| (SEQ ID NO) | validation) | (q = −0.167) | (q = −0.167) | (q = −0.331) | (q = −0.331) |
| 1-100 | 0.9 | 0.75 | 0.86 | 0.86 | 0.77 |
| 1-500 | 0.92 | 0.77 | 0.9 | 0.86 | 0.77 |
| 1-1000 | 0.92 | 0.72 | 0.89 | 0.87 | 0.77 |
| 1-1500 | 0.92 | 0.78 | 0.91 | 0.89 | 0.76 |
| 1-2000 | 0.92 | 0.79 | 0.9 | 0.89 | 0.76 |
| 1-2500 | 0.92 | 0.8 | 0.89 | 0.9 | 0.75 |
| 1-3000 | 0.92 | 0.8 | 0.89 | 0.9 | 0.73 |
| 1-3500 | 0.92 | 0.8 | 0.89 | 0.9 | 0.73 |
| 1-4000 | 0.92 | 0.78 | 0.9 | 0.9 | 0.76 |
| 1-4500 | 0.92 | 0.8 | 0.89 | 0.9 | 0.74 |
| 1-5000 | 0.92 | 0.78 | 0.89 | 0.9 | 0.75 |

TABLE 6

| CpG subset | AUC (internal | Sensitivity | Specificity | Sensitivity | Specificty |
|---|---|---|---|---|---|
| (SEQ ID NO) | validation) | (q = −0.167) | (q = −0.167) | (q = −0.331) | (q = −0.331) |
| 1-5000 | 0.92 | 0.78 | 0.89 | 0.9 | 0.75 |
| 101-5000 | 0.91 | 0.74 | 0.9 | 0.9 | 0.75 |
| 501-5000 | 0.88 | 0.76 | 0.81 | 0.86 | 0.66 |
| 1001-5000 | 0.84 | 0.8 | 0.7 | 0.86 | 0.57 |
| 1501-5000 | 0.82 | 0.8 | 0.66 | 0.87 | 0.52 |
| 2001-5000 | 0.82 | 0.79 | 0.65 | 0.87 | 0.52 |
| 2501-5000 | 0.82 | 0.79 | 0.63 | 0.89 | 0.53 |
| 3001-5000 | 0.81 | 0.8 | 0.6 | 0.89 | 0.51 |
| 3501-5000 | 0.82 | 0.79 | 0.6 | 0.9 | 0.51 |
| 4001-5000 | 0.8 | 0.79 | 0.59 | 0.86 | 0.49 |
| 4501-5000 | 0.81 | 0.8 | 0.61 | 0.87 | 0.49 |

[0942] The predicting of the presence, absence, or development of cancer in an individual may particularly involve determining the mean β-value across any panel of one or more CpGs defined herein. A threshold mean β-value may be applied in order to stratify an individual as having or not having cancer, or of having a high or low risk of CIN3 and/or cancer development, preferably wherein the cancer is cervical or endometrial cancer, more preferably wherein the cancer is cervical cancer.

[0943] In any of the assays described herein, wherein:
[0944] 4. when the cancer index for the individual is about 0.016 or more the individual is classified as having CIN3 and/or cancer or as having a high risk of CIN3 and/or cancer development; or
[0945] 5. when the cancer index for the individual is less than about 0.016 the individual is classified as not having CIN3 and/or cancer;
[0946] preferably wherein the assay has a specificity of 75% or more, more preferably wherein the assay comprises determining mean β-values for each CpG in the panel of one or more CpGs.

[0947] In any of the assays described herein, wherein:
[0948] a. when the cancer index for the individual is about 0.025 or more the individual is classified as having CIN3 and/or cancer or as having a high risk of CIN3 and/or cancer development; or
[0949] b. when the cancer index for the individual is less than about 0.025 the individual is classified as not having CIN3 and/or cancer;
[0950] preferably wherein the assay has a specificity of 75% or more, more preferably wherein the assay comprises determining mean β-values for each CpG in the panel of one or more CpGs.

[0951] In any of the assays described herein, wherein:
[0952] a. when the cancer index for the individual is about 0.050 or more the individual is classified as having CIN3 and/or cancer or as having a high risk of CIN3 and/or cancer development; or
[0953] b. when the cancer index for the individual is less than about 0.050 the individual is classified as not having CIN3 and/or cancer;
[0954] preferably wherein the assay has a specificity of 75% or more, more preferably wherein the assay comprises determining mean β-values for each CpG in the panel of one or more CpGs.

[0955] In any of the assays described herein, wherein:
[0956] a. when the cancer index for the individual is about 0.075 or more the individual is classified as having CIN3 and/or cancer or as having a high risk of CIN3 and/or cancer development; or
[0957] b. when the cancer index for the individual is less than about 0.075 the individual is classified as not having CIN3 and/or cancer;
[0958] preferably wherein the assay has a specificity of 75% or more, more preferably wherein the assay comprises determining mean β-values for each CpG in the panel of one or more CpGs.

[0959] In any of the assays described herein, wherein:
[0960] a. when the cancer index for the individual is about 0.100 or more the individual is classified as having CIN3 and/or cancer or as having a high risk of CIN3 and/or cancer development; or
[0961] b. when the cancer index for the individual is less than about 0.100 the individual is classified as not having CIN3 and/or cancer;
[0962] preferably wherein the assay has a specificity of 75% or more, more preferably wherein the assay comprises determining mean β-values for each CpG in the panel of one or more CpGs.

[0963] In any of the assays described herein, wherein:
[0964] a. when the cancer index for the individual is about 0.125 or more the individual is classified as having CIN3 and/or cancer or as having a high risk of CIN3 and/or cancer development; or
[0965] b. when the cancer index for the individual is less than about 0.125 the individual is classified as not having CIN3 and/or cancer;
[0966] preferably wherein the assay has a specificity of 75% or more, more preferably wherein the assay comprises determining mean β-values for each CpG in the panel of one or more CpGs.

[0967] In any of the assays described herein, wherein:
[0968] a. when the cancer index for the individual is about 0.150 or more the individual is classified as having CIN3 and/or cancer or as having a high risk of CIN3 and/or cancer development; or
[0969] b. when the cancer index for the individual is less than about 0.150 the individual is classified as not having CIN3 and/or cancer;
[0970] preferably wherein the assay has a specificity of 75% or more, more preferably wherein the assay comprises determining mean β-values for each CpG in the panel of one or more CpGs.

[0971] In any of the assays described herein, wherein:
[0972] a. when the cancer index for the individual is about 0.175 or more the individual is classified as having CIN3 and/or cancer or as having a high risk of CIN3 and/or cancer development; or
[0973] b. when the cancer index for the individual is less than about 0.175 the individual is classified as not having CIN3 and/or cancer;
[0974] preferably wherein the assay has a specificity of 75% or more, more preferably wherein the assay comprises determining mean β-values for each CpG in the panel of one or more CpGs.

[0975] In any of the assays described herein, wherein:
[0976] a. when the cancer index for the individual is about 0.200 or more the individual is classified as having CIN3 and/or cancer or as having a high risk of CIN3 and/or cancer development; or
[0977] b. when the cancer index for the individual is less than about 0.200 the individual is classified as not having CIN3 and/or cancer;
[0978] preferably wherein the assay has a specificity of 75% or more, more preferably wherein the assay comprises determining mean β-values for each CpG in the panel of one or more CpGs.

[0979] In any of the assays described herein, wherein:
[0980] a. when the cancer index for the individual is about 0.225 or more the individual is classified as having CIN3 and/or cancer or as having a high risk of CIN3 and/or cancer development; or
[0981] b. when the cancer index for the individual is less than about 0.225 the individual is classified as not having CIN3 and/or cancer;
[0982] preferably wherein the assay has a specificity of 75% or more, more preferably wherein the assay comprises determining mean β-values for each CpG in the panel of one or more CpGs.

[0983] In any of the assays described herein, wherein:
[0984] a. when the cancer index for the individual is about 0.250 or more the individual is classified as having CIN3 and/or cancer or as having a high risk of CIN3 and/or cancer development; or
[0985] b. when the cancer index for the individual is less than about 0.250 the individual is classified as not having CIN3 and/or cancer;
[0986] preferably wherein the assay has a specificity of 75% or more, more preferably wherein the assay comprises determining mean β-values for each CpG in the panel of one or more CpGs.

[0987] In any of the assays described herein:
[0988] 1. CpGs whose cancer index value is determined are located within at least DMR 1 defined by SEQ ID NO: 5001, and wherein when the cancer index for the individual is about 0.023 or more the individual is classified as having CIN3 and/or cancer or as having a high risk of CIN3 and/or cancer development, and wherein the sensitivity of the assay is at least 85.00% and the specificity of the assay is at least 75.00%, preferably wherein the panel of one or more CpGs comprises at least ten CpGs from DMR 1, and more preferably wherein the cancer index value is the mean β-value for the CpGs denoted by [[CG]] in SEQ ID NO: 5001;
[0989] 2. CpGs whose cancer index value is determined are located within at least DMR 1 defined by SEQ ID NO: 5001, and wherein when the cancer index for the individual is less than about 0.023 the individual is classified as not having CIN3 and/or cancer or as having a low risk of CIN3 and/or cancer development, and wherein the sensitivity of the assay is at least 70.00% and the specificity of the assay is at least 75.00%, preferably wherein the panel of one or more CpGs comprises at least ten CpGs from DMR 1, and more preferably wherein the cancer index value is the mean β-value for the CpGs denoted by [[CG]] in SEQ ID NO: 5001;
[0990] 3. CpGs whose cancer index value is determined are located within at least DMR 2 defined by SEQ ID NO: 5002, and wherein when the cancer index for the individual is about 0.023 or more the individual is classified as having CIN3 and/or cancer or as having a high risk of CIN3 and/or cancer development, and wherein the sensitivity of the assay is at least 85.00% and the specificity of the assay is at least 75.00%, preferably wherein the panel of one or more CpGs comprises at least ten CpG from DMR 2, and more preferably wherein the cancer index value is the mean β-value for the CpGs denoted by [[CG]] in SEQ ID NO: 5002;
[0991] 4. CpGs whose cancer index value is determined are located within at least DMR 2 defined by SEQ ID NO: 5002, and wherein when the cancer index for the individual is less than about 0.023 the individual is classified as not having CIN3 and/or cancer or as having a low risk of CIN3 and/or cancer development, and wherein the sensitivity of the assay is at least 85.00% and the specificity of the assay is at least 75.00%, preferably wherein the panel of one or more CpGs comprises at least ten CpGs from DMR 2, and more preferably wherein the cancer index value is the mean β-value for the CpGs denoted by [[CG]] in SEQ ID NO: 5002;
[0992] 5. CpGs whose cancer index value is determined are located within at least DMR 3 defined by SEQ ID NO: 5003, and wherein when the cancer index for the individual is about 0.023 or more the individual is classified as having CIN3 and/or cancer or as having a high risk of CIN3 and/or cancer development, and wherein the sensitivity of the assay is at least 85.00% and the specificity of the assay is at least 75.00%, preferably wherein the panel of one or more CpGs comprises at least ten CpG from DMR 3, and more preferably wherein the cancer index value is the mean β-value for the CpGs denoted by [[CG]] in SEQ ID NO: 5003;
[0993] 6. CpGs whose cancer index value is determined are located within at least DMR 3 defined by SEQ ID NO: 5003, and wherein when the cancer index for the individual is less than about 0.023 the individual is classified as not having CIN3 and/or cancer or as having a low risk of CIN3 and/or cancer development, and wherein the sensitivity of the assay is at least 85.00% and the specificity of the assay is at least 75.00%, preferably wherein the panel of one or more CpGs comprises at least ten CpG from DMR 3, and more preferably wherein the cancer index value is the mean β-value for the CpGs denoted by [[CG]] in SEQ ID NO: 5003;
[0994] 7. CpGs whose cancer index value is determined are located within at least DMR 4 defined by SEQ ID NO: 5004, and wherein when the cancer index for the individual is about 0.023 or more the individual is classified as having CIN3 and/or cancer or as having a high risk of CIN3 and/or cancer development, and wherein the sensitivity of the assay is at least 85.00% and the specificity of the assay is at least 75.00%, DMR 4, and more preferably wherein the cancer index value is the mean β-value for the CpGs denoted by [[CG]] in SEQ ID NO: 5004;
[0995] 8. CpGs whose cancer index value is determined are located within at least DMR 4 defined by SEQ ID NO: 5004, and wherein when the cancer index for the individual is less than about 0.023 the individual is classified as not having CIN3 and/or cancer or as having a low risk of CIN3 and/or cancer development, and wherein the sensitivity of the assay is at least 85.00% and the specificity of the assay is at least 75.00%, preferably wherein the panel of one or more CpGs comprises at least ten CpG from DMR 4, and more preferably wherein the cancer index value is the mean β-value for the CpGs denoted by [[CG]] in SEQ ID NO: 5004;
[0996] 9. CpGs whose cancer index value is determined are located within at least DMR 5 defined by SEQ ID NO: 5005, and wherein when the cancer index for the individual is about 0.023 or more the individual is classified as having CIN3 and/or cancer or as having a high risk of CIN3 and/or cancer development, and wherein the sensitivity of the assay is at least 85.00% and the specificity of the assay is at least 75.00%, preferably wherein the panel of one or more CpGs comprises at least ten CpG from DMR 5, and more preferably wherein the cancer index value is the mean β-value for the CpGs denoted by [[CG]] in SEQ ID NO: 5005;
[0997] 10. CpGs whose cancer index value is determined are located within at least DMR 5 defined by SEQ ID NO: 5005, and wherein when the cancer index for the individual is less than about 0.023 the individual is classified as not having CIN3 and/or cancer or as having a low risk of CIN3 and/or cancer development, and wherein the sensitivity of the assay is at least 85.00% and the specificity of the assay is at least 75.00%, preferably wherein the panel of one or more CpGs comprises at least ten CpG from DMR 5, and more preferably wherein the cancer index value is the mean β-value for the CpGs denoted by [[CG]] in SEQ ID NO: 5005;
[0998] 11. CpGs whose cancer index value is determined are located within at least DMR 6 defined by SEQ ID NO: 5006, and wherein when the cancer index for the individual is about 0.027 or more the individual is classified as having CIN3 and/or cancer or as having a high risk of CIN3 and/or cancer development, and wherein the sensitivity of the assay is at least 83.00% and the specificity of the assay is at least 75.00%, preferably wherein the panel of one or more CpGs comprises at least nine CpG from DMR 6, and more preferably wherein the cancer index value is the mean β-value for the CpGs denoted by [[CG]] in SEQ ID NO: 5006;
[0999] 12. CpGs whose cancer index value is determined are located within at least DMR 6 defined by SEQ ID NO: 5006, and wherein when the cancer index for the individual is less than about 0.027 the individual is classified as not having CIN3 and/or cancer or as having a low risk of CIN3 and/or cancer development, and wherein the sensitivity of the assay is at least 83.00% and the specificity of the assay is at least 75.00%, preferably wherein the panel of one or more CpGs comprises at least nine CpG from DMR 6, and more preferably wherein the cancer index value is the mean β-value for the CpGs denoted by [[CG]] in SEQ ID NO: 5006;
[1000] 13. CpGs whose cancer index value is determined are located within at least DMR 7 defined by SEQ ID NO: 5007, and wherein when the cancer index for the individual is about 0.027 or more the individual is classified as having CIN3 and/or cancer or as having a high risk of CIN3 and/or cancer development, and wherein the sensitivity of the assay is at least 80.00% and the specificity of the assay is at least 75.00%, preferably wherein the panel of one or more CpGs comprises at least nine CpG from DMR 7, and more preferably wherein the cancer index value is the mean β-value for the CpGs denoted by [[CG]] in SEQ ID NO: 5007;
[1001] 14. CpGs whose cancer index value is determined are located within at least DMR 7 defined by SEQ ID NO: 5007, and wherein when the cancer index for the individual is less than about 0.027 the individual is classified as not having CIN3 and/or cancer or as having a low risk of CIN3 and/or cancer development, and wherein the sensitivity of the assay is at least 80.00% and the specificity of the assay is at least 75.00%, preferably wherein the panel of one or more CpGs comprises at least nine CpG from DMR 7, and more preferably wherein the cancer index value is the mean β-value for the CpGs denoted by [[CG]] in SEQ ID NO: 5007;
[1002] 15. CpGs whose cancer index value is determined are located within at least DMR 8 defined by SEQ ID NO: 5008, and wherein when the cancer index for the individual is about 0.027 or more the individual is classified as having CIN3 and/or cancer or as having a high risk of CIN3 and/or cancer development, and wherein the sensitivity of the assay is at least 80.00% and the specificity of the assay is at least 75.00%, preferably wherein the panel of one or more CpGs comprises at least nine CpG from DMR 8, and more preferably wherein the cancer index value is the mean β-value for the CpGs denoted by [[CG]] in SEQ ID NO: 5008;
[1003] 16. CpGs whose cancer index value is determined are located within at least DMR 8 defined by SEQ ID NO: 5008, and wherein when the cancer index for the individual is less than about 0.027 the individual is classified as not having CIN3 and/or cancer or as having a low risk of CIN3 and/or cancer development, and wherein the sensitivity of the assay is at least 80.00% and the specificity of the assay is at least 75.00%, preferably wherein the panel of one or more CpGs comprises at least nine CpG from DMR 8, and more preferably wherein the cancer index value is the mean β-value for the CpGs denoted by [[CG]] in SEQ ID NO: 5008;
[1004] 17. CpGs whose cancer index value is determined are located within at least DMR 9 defined by SEQ ID NO: 5009, and wherein when the cancer index for the individual is about 0.027 or more the individual is classified as having CIN3 and/or cancer or as having a high risk of CIN3 and/or cancer development, and wherein the sensitivity of the assay is at least 80.00% and the specificity of the assay is at least 75.00%, preferably wherein the panel of one or more CpGs comprises at least nine CpG from DMR 9, and more preferably wherein the cancer index value is the mean β-value for the CpGs denoted by [[CG]] in SEQ ID NO: 5009;
[1005] 18. CpGs whose cancer index value is determined are located within at least DMR 9 defined by SEQ ID NO: 5009, and wherein when the cancer index for the individual is less than about 0.027 the individual is classified as not having CIN3 and/or cancer or as having a low risk of CIN3 and/or cancer development, and wherein the sensitivity of the assay is at least 80.00% and the specificity of the assay is at least 75.00%, preferably wherein the panel of one or more CpGs comprises at least nine CpG from DMR 9, and more preferably wherein the cancer index value is the mean β-value for the CpGs denoted by [[CG]] in SEQ ID NO: 5009;
[1006] 19. CpGs whose cancer index value is determined are located within at least DMR 10 defined by SEQ ID NO: 5010, and wherein when the cancer index for the individual is about 0.027 or more the individual is classified as having CIN3 and/or cancer or as having a high risk of CIN3 and/or cancer development, and wherein the sensitivity of the assay is at least 80.00% and the specificity of the assay is at least 75.00%, preferably wherein the panel of one or more CpGs comprises at least nine CpG from DMR 10, and more preferably wherein the cancer index value is the mean β-value for the CpGs denoted by [[CG]] in SEQ ID NO: 5010;
[1007] 20. CpGs whose cancer index value is determined are located within at least DMR 10 defined by SEQ ID NO: 5010, and wherein when the cancer index for the individual is less than about 0.027 the individual is classified as not having CIN3 and/or cancer or as having a low risk of CIN3 and/or cancer development, and wherein the sensitivity of the assay is at least 80.00% and the specificity of the assay is at least 75.00%, preferably wherein the panel of one or more CpGs comprises at least nine CpG from DMR 10, and more preferably wherein the cancer index value is the mean β-value for the CpGs denoted by [[CG]] in SEQ ID NO: 5010;
[1008] 21. CpGs whose cancer index value is determined are located within at least DMR 11 defined by SEQ ID NO: 5011, and wherein when the cancer index for the individual is about 0.027 or more the individual is classified as having CIN3 and/or cancer or as having a high risk of CIN3 and/or cancer development, and wherein the sensitivity of the assay is at least 80.00% and the specificity of the assay is at least 75.00%, preferably wherein the panel of one or more CpGs comprises at least nine CpG from DMR 11, and more preferably wherein the cancer index value is the mean β-value for the CpGs denoted by [[CG]] in SEQ ID NO: 5011;
[1009] 22. CpGs whose cancer index value is determined are located within at least DMR 11 defined by SEQ ID NO: 5011, and wherein when the cancer index for the individual is less than about 0.027 the individual is classified as not having CIN3 and/or cancer or as having a low risk of CIN3 and/or cancer development, and wherein the sensitivity of the assay is at least 80.00% and the specificity of the assay is at least 75.00%, preferably wherein the panel of one or more CpGs comprises at least nine CpG from DMR 11, and more preferably wherein the cancer index value is the mean β-value for the CpGs denoted by [[CG]] in SEQ ID NO: 5011;
[1010] 23. CpGs whose cancer index value is determined are located within at least DMR 12 defined by SEQ ID NO: 5012, and wherein when the cancer index for the individual is about 0.027 or more the individual is classified as having CIN3 and/or cancer or as having a high risk of CIN3 and/or cancer development, and wherein the sensitivity of the assay is at least 80.00% and the specificity of the assay is at least 75.00%, preferably wherein the panel of one or more CpGs comprises at least nine CpG from DMR 12, and more preferably wherein the cancer index value is the mean β-value for the CpGs denoted by [[CG]] in SEQ ID NO: 5012;
[1011] 24. CpGs whose cancer index value is determined are located within at least DMR 12 defined by SEQ ID NO: 5012, and wherein when the cancer index for the individual is less than about 0.027 the individual is classified as not having CIN3 and/or cancer or as having a low risk of CIN3 and/or cancer development, and wherein the sensitivity of the assay is at least 80.00% and the specificity of the assay is at least 75.00%, preferably wherein the panel of one or more CpGs comprises at least nine CpG from DMR 12, and more preferably wherein the cancer index value is the mean β-value for the CpGs denoted by [[CG]] in SEQ ID NO: 5012;
[1012] 25. CpGs whose cancer index value is determined are located within at least DMR 13 defined by SEQ ID NO: 5013, and wherein when the cancer index for the individual is about 0.027 or more the individual is classified as having CIN3 and/or cancer or as having a high risk of CIN3 and/or cancer development, and wherein the sensitivity of the assay is at least 80.00% and the specificity of the assay is at least 75.00%, preferably wherein the panel of one or more CpGs comprises at least nine CpG from DMR 13, and more preferably wherein the cancer index value is the mean β-value for the CpGs denoted by [[CG]] in SEQ ID NO: 5013;
[1013] 26. CpGs whose cancer index value is determined are located within at least DMR 13 defined by SEQ ID NO: 5013, and wherein when the cancer index for the individual is less than about 0.027 the individual is classified as not having CIN3 and/or cancer or as having a low risk of CIN3 and/or cancer development, and wherein the sensitivity of the assay is at least 80.00% and the specificity of the assay is at least 75.00%, preferably wherein the panel of one or more CpGs comprises at least nine CpG from DMR 13, and more preferably wherein the cancer index value is the mean β-value for the CpGs denoted by [[CG]] in SEQ ID NO: 5013;
[1014] 27. CpGs whose cancer index value is determined are located within at least DMR 14 defined by SEQ ID NO: 5014, and wherein when the cancer index for the individual is about 0.02 or more the individual is classified as having CIN3 and/or cancer or as having a high risk of CIN3 and/or cancer development, and wherein the sensitivity of the assay is at least 80.00% and the specificity of the assay is at least 75.00%, preferably wherein the panel of one or more CpGs comprises at least two CpG from DMR 14, and more preferably wherein the cancer index value is the mean β-value for the CpGs denoted by [[CG]] in SEQ ID NO: 5014;
[1015] 28. CpGs whose cancer index value is determined are located within at least DMR 14 defined by SEQ ID NO: 5014, and wherein when the cancer index for the individual is less than about 0.02 the individual is classified as not having CIN3 and/or cancer or as having a low risk of CIN3 and/or cancer development, and wherein the sensitivity of the assay is at least 80.00% and the specificity of the assay is at least 75.00%, preferably wherein the panel of one or more CpGs comprises at least two CpG from DMR 14, and more preferably wherein the cancer index value is the mean β-value for the CpGs denoted by [[CG]] in SEQ ID NO: 5014;
[1016] 29. CpGs whose cancer index value is determined are located within at least DMR 15 defined by SEQ ID NO: 5015, and wherein when the cancer index for the individual is about 0.026 or more the individual is classified as having CIN3 and/or cancer or as having a high risk of CIN3 and/or cancer development, and wherein the sensitivity of the assay is at least 83.00% and the specificity of the assay is at least 75.00%, preferably wherein the panel of one or more CpGs comprises at least six CpG from DMR 15, and more preferably wherein the cancer index value is the mean β-value for the CpGs denoted by [[CG]] in SEQ ID NO: 5015;
[1017] 30. CpGs whose cancer index value is determined are located within at least DMR 15 defined by SEQ ID NO: 5015, and wherein when the cancer index for the individual is less than about 0.026 the individual is classified as not having CIN3 and/or cancer or as having a low risk of CIN3 and/or cancer development, and wherein the sensitivity of the assay is at least 83.00% and the specificity of the assay is at least 75.00%, DMR 15, and more preferably wherein the cancer index value is the mean β-value for the CpGs denoted by [[CG]] in SEQ ID NO: 5015;
[1018] 31. CpGs whose cancer index value is determined are located within at least DMR 16 defined by SEQ ID NO: 5016, and wherein when the cancer index for the individual is about 0.026 or more the individual is classified as having CIN3 and/or cancer or as having a high risk of CIN3 and/or cancer development, and wherein the sensitivity of the assay is at least 83.00% and the specificity of the assay is at least 75.00%, preferably wherein the panel of one or more CpGs comprises at least six CpG from DMR 16, and more preferably wherein the cancer index value is the mean β-value for the CpGs denoted by [[CG]] in SEQ ID NO: 5016;
[1019] 32. CpGs whose cancer index value is determined are located within at least DMR 16 defined by SEQ ID NO: 5016, and wherein when the cancer index for the individual is less than about 0.026 the individual is classified as not having CIN3 and/or cancer or as having a low risk of CIN3 and/or cancer development, and wherein the sensitivity of the assay is at least 83.00% and the specificity of the assay is at least 75.00%, preferably wherein the panel of one or more CpGs comprises at least six CpG from DMR 16, and more preferably wherein the cancer index value is the mean β-value for the CpGs denoted by [[CG]] in SEQ ID NO: 5016;
[1020] 33. CpGs whose cancer index value is determined are located within at least DMR 17 defined by SEQ ID NO: 5017, and wherein when the cancer index for the individual is about 0.026 or more the individual is classified as having CIN3 and/or cancer or as having a high risk of CIN3 and/or cancer development, and wherein the sensitivity of the assay is at least 83.00% and the specificity of the assay is at least 75.00%, preferably wherein the panel of one or more CpGs comprises at least six CpG from DMR 17, and more preferably wherein the cancer index value is the mean β-value for the CpGs denoted by [[CG]] in SEQ ID NO: 5017;
[1021] 34. CpGs whose cancer index value is determined are located within at least DMR 17 defined by SEQ ID NO: 5017, and wherein when the cancer index for the individual is less than about 0.026 the individual is classified as not having CIN3 and/or cancer or as having a low risk of CIN3 and/or cancer development, and wherein the sensitivity of the assay is at least 83.00% and the specificity of the assay is at least 75.00%, preferably wherein the panel of one or more CpGs comprises at least six CpG from DMR 17, and more preferably wherein the cancer index value is the mean β-value for the CpGs denoted by [[CG]] in SEQ ID NO: 5017;
[1022] 35. CpGs whose cancer index value is determined are located within at least DMR 18 defined by SEQ ID NO: 5018, and wherein when the cancer index for the individual is about 0.025 or more the individual is classified as having CIN3 and/or cancer or as having a high risk of CIN3 and/or cancer development, and wherein the sensitivity of the assay is at least 78.00% and the specificity of the assay is at least 75.00%, preferably wherein the panel of one or more CpGs comprises at least fifteen CpG from DMR 18, and more preferably wherein the cancer index value is the mean β-value for the CpGs denoted by [[CG]] in SEQ ID NO: 5018;
[1023] 36. CpGs whose cancer index value is determined are located within at least DMR 18 defined by SEQ ID NO: 5018, and wherein when the cancer index for the individual is less than about 0.025 the individual is classified as not having CIN3 and/or cancer or as having a low risk of CIN3 and/or cancer development, and wherein the sensitivity of the assay is at least 78.00% and the specificity of the assay is at least 75.00%, preferably wherein the panel of one or more CpGs comprises at least fifteen CpG from DMR 18, and more preferably wherein the cancer index value is the mean β-value for the CpGs denoted by [[CG]] in SEQ ID NO: 5018;
[1024] 37. CpGs whose cancer index value is determined are located within at least DMR 19 defined by SEQ ID NO: 5019, and wherein when the cancer index for the individual is about 0.025 or more the individual is classified as having CIN3 and/or cancer or as having a high risk of CIN3 and/or cancer development, and wherein the sensitivity of the assay is at least 78.00% and the specificity of the assay is at least 75.00%, preferably wherein the panel of one or more CpGs comprises at least fifteen CpG from DMR 19, and more preferably wherein the cancer index value is the mean β-value for the CpGs denoted by [[CG]] in SEQ ID NO: 5019;
[1025] 38. CpGs whose cancer index value is determined are located within at least DMR 19 defined by SEQ ID NO: 5019, and wherein when the cancer index for the individual is less than about 0.025 the individual is classified as not having CIN3 and/or cancer or as having a low risk of CIN3 and/or cancer development, and wherein the sensitivity of the assay is at least 78.00% and the specificity of the assay is at least 75.00%, preferably wherein the panel of one or more CpGs comprises at least fifteen CpG from DMR 19, and more preferably wherein the cancer index value is the mean β-value for the CpGs denoted by [[CG]] in SEQ ID NO: 5019;
[1026] 39. CpGs whose cancer index value is determined are located within at least DMR 20 defined by SEQ ID NO: 5020, and wherein when the cancer index for the individual is about 0.028 or more the individual is classified as having CIN3 and/or cancer or as having a high risk of CIN3 and/or cancer development, and wherein the sensitivity of the assay is at least 80.00% and the specificity of the assay is at least 75.00%, preferably wherein the panel of one or more CpGs comprises at least ten CpG from DMR 20, and more preferably wherein the cancer index value is the mean β-value for the CpGs denoted by [[CG]] in SEQ ID NO: 5020;
[1027] 40. CpGs whose cancer index value is determined are located within at least DMR 20 defined by SEQ ID NO: 5020, and wherein when the cancer index for the individual is less than about 0.028 the individual is classified as not having CIN3 and/or cancer or as having a low risk of CIN3 and/or cancer development, and wherein the sensitivity of the assay is at least 80.00% and the specificity of the assay is at least 75.00%, preferably wherein the panel of one or more CpGs comprises at least ten CpG from DMR 20, and more preferably wherein the cancer index value is the mean β-value for the CpGs denoted by [[CG]] in SEQ ID NO: 5020;
[1028] 41. CpGs whose cancer index value is determined are located within at least DMR 21 defined by SEQ ID NO: 5021, and wherein when the cancer index for the individual is about 0.03 or more the individual is classified as having CIN3 and/or cancer or as having a high risk of CIN3 and/or cancer development, and wherein the sensitivity of the assay is at least 80.00% and the specificity of the assay is at least 75.00%, preferably wherein the panel of one or more CpGs comprises at least seven CpG from DMR 21, and more preferably wherein the cancer index value is the mean β-value for the CpGs denoted by [[CG]] in SEQ ID NO: 5021;
[1029] 42. CpGs whose cancer index value is determined are located within at least DMR 21 defined by SEQ ID NO: 5021, and wherein when the cancer index for the individual is less than about 0.03 the individual is classified as not having CIN3 and/or cancer or as having a low risk of CIN3 and/or cancer development, and wherein the sensitivity of the assay is at least 80.00% and the specificity of the assay is at least 75.00%, preferably wherein the panel of one or more CpGs comprises at least seven CpG from DMR 21, and more preferably wherein the cancer index value is the mean β-value for the CpGs denoted by [[CG]] in SEQ ID NO: 5021;
[1030] 43. CpGs whose cancer index value is determined are located within at least DMR 22 defined by SEQ ID NO: 5022, and wherein when the cancer index for the individual is about 0.019 or more the individual is classified as having CIN3 and/or cancer or as having a high risk of CIN3 and/or cancer development, and wherein the sensitivity of the assay is at least 82.00% and the specificity of the assay is at least 75.00%, preferably wherein the panel of one or more CpGs comprises at least four CpG from DMR 22, and more preferably wherein the cancer index value is the mean β-value for the CpGs denoted by [[CG]] in SEQ ID NO: 5022;
[1031] 44. CpGs whose cancer index value is determined are located within at least DMR 22 defined by SEQ ID NO: 5022, and wherein when the cancer index for the individual is less than about 0.019 the individual is classified as not having CIN3 and/or cancer or as having a low risk of CIN3 and/or cancer development, and wherein the sensitivity of the assay is at least 82.00% and the specificity of the assay is at least 75.00%, preferably wherein the panel of one or more CpGs comprises at least four CpG from DMR 22, and more preferably wherein the cancer index value is the mean β-value for the CpGs denoted by [[CG]] in SEQ ID NO: 5022;
[1032] 45. CpGs whose cancer index value is determined are located within at least DMR 23 defined by SEQ ID NO: 5023, and wherein when the cancer index for the individual is about 0.029 or more the individual is classified as having CIN3 and/or cancer or as having a high risk of CIN3 and/or cancer development, and wherein the sensitivity of the assay is at least 82.00% and the specificity of the assay is at least 75.00%, preferably wherein the panel of one or more CpGs comprises at least six CpG from DMR 23, and more preferably wherein the cancer index value is the mean β-value for the CpGs denoted by [[CG]] in SEQ ID NO: 5023;
[1033] 46. CpGs whose cancer index value is determined are located within at least DMR 23 defined by SEQ ID NO: 5023, and wherein when the cancer index for the individual is less than about 0.029 the individual is classified as not having CIN3 and/or cancer or as having a low risk of CIN3 and/or cancer development, and wherein the sensitivity of the assay is at least 82.00% and the specificity of the assay is at least 75.00%, preferably wherein the panel of one or more CpGs comprises at least six CpG from DMR 23, and more preferably wherein the cancer index value is the mean β-value for the CpGs denoted by [[CG]] in SEQ ID NO: 5023;
[1034] 47. CpGs whose cancer index value is determined are located within at least DMR 24 defined by SEQ ID NO: 5024, and wherein when the cancer index for the individual is about 0.039 or more the individual is classified as having CIN3 and/or cancer or as having a high risk of CIN3 and/or cancer development, and wherein the sensitivity of the assay is at least 78.00% and the specificity of the assay is at least 75.00%, preferably wherein the panel of one or more CpGs comprises at least three CpG from DMR 24, and more preferably wherein the cancer index value is the mean β-value for the CpGs denoted by [[CG]] in SEQ ID NO: 5024;
[1035] 48. CpGs whose cancer index value is determined are located within at least DMR 24 defined by SEQ ID NO: 5024, and wherein when the cancer index for the individual is less than about 0.039 the individual is classified as not having CIN3 and/or cancer or as having a low risk of CIN3 and/or cancer development, and wherein the sensitivity of the assay is at least 78.00% and the specificity of the assay is at least 75.00%, preferably wherein the panel of one or more CpGs comprises at least three CpG from DMR 24, and more preferably wherein the cancer index value is the mean β-value for the CpGs denoted by [[CG]] in SEQ ID NO: 5024;
[1036] 49. CpGs whose cancer index value is determined are located within at least DMR 25 defined by SEQ ID NO: 5025, and wherein when the cancer index for the individual is about 0.048 or more the individual is classified as having CIN3 and/or cancer or as having a high risk of CIN3 and/or cancer development, and wherein the sensitivity of the assay is at least 80.00% and the specificity of the assay is at least 75.00%, preferably wherein the panel of one or more CpGs comprises at least three CpG from DMR 25, and more preferably wherein the cancer index value is the mean β-value for the CpGs denoted by [[CG]] in SEQ ID NO: 5025;
[1037] 50. CpGs whose cancer index value is determined are located within at least DMR 25 defined by SEQ ID NO: 5025, and wherein when the cancer index for the individual is less than about 0.048 the individual is classified as not having CIN3 and/or cancer or as having a low risk of CIN3 and/or cancer development, and wherein the sensitivity of the assay is at least 80.00% and the specificity of the assay is at least 75.00%, preferably wherein the panel of one or more CpGs comprises at least three CpG from DMR 25, and more preferably wherein the cancer index value is the mean β-value for the CpGs denoted by [[CG]] in SEQ ID NO: 5025;
[1038] 51. CpGs whose cancer index value is determined are located within at least DMR 26 defined by SEQ ID NO: 5026, and wherein when the cancer index for the individual is about 0.048 or more the individual is classified as having CIN3 and/or cancer or as having a high risk of CIN3 and/or cancer development, and wherein the sensitivity of the assay is at least 80.00% and the specificity of the assay is at least 75.00%, preferably wherein the panel of one or more CpGs comprises at least three CpG from DMR 26, and more preferably wherein the cancer index value is the mean β-value for the CpGs denoted by [[CG]] in SEQ ID NO: 5026;
[1039] 52. CpGs whose cancer index value is determined are located within at least DMR 26 defined by SEQ ID NO: 5026, and wherein when the cancer index for the individual is less than about 0.048 the individual is classified as not having CIN3 and/or cancer or as having a low risk of CIN3 and/or cancer development, and wherein the sensitivity of the assay is at least 80.00% and the specificity of the assay is at least 75.00%, preferably wherein the panel of one or more CpGs comprises at least three CpG from DMR 26, and more preferably wherein the cancer index value is the mean β-value for the CpGs denoted by [[CG]] in SEQ ID NO: 5026;
[1040] 53. CpGs whose cancer index value is determined are located within at least DMR 27 defined by SEQ ID NO: 5027, and wherein when the cancer index for the individual is about 0.022 or more the individual is classified as having CIN3 and/or cancer or as having a high risk of CIN3 and/or cancer development, and wherein the sensitivity of the assay is at least 79.00% and the specificity of the assay is at least 75.00%, DMR 27, and more preferably wherein the cancer index value is the mean β-value for the CpGs denoted by [[CG]] in SEQ ID NO: 5027;
[1041] 54. CpGs whose cancer index value is determined are located within at least DMR 27 defined by SEQ ID NO: 5027, and wherein when the cancer index for the individual is less than about 0.022 the individual is classified as not having CIN3 and/or cancer or as having a low risk of CIN3 and/or cancer development, and wherein the sensitivity of the assay is at least 79.00% and the specificity of the assay is at least 75.00%, preferably wherein the panel of one or more CpGs comprises at least five CpG from DMR 27, and more preferably wherein the cancer index value is the mean β-value for the CpGs denoted by [[CG]] in SEQ ID NO: 5027;
[1042] 55. CpGs whose cancer index value is determined are located within at least DMR 28 defined by SEQ ID NO: 5028, and wherein when the cancer index for the individual is about 0.048 or more the individual is classified as having CIN3 and/or cancer or as having a high risk of CIN3 and/or cancer development, and wherein the sensitivity of the assay is at least 80.00% and the specificity of the assay is at least 75.00%, preferably wherein the panel of one or more CpGs comprises at least three CpG from DMR 28, and more preferably wherein the cancer index value is the mean β-value for the CpGs denoted by [[CG]] in SEQ ID NO: 5028;
[1043] 56. CpGs whose cancer index value is determined are located within at least DMR 28 defined by SEQ ID NO: 5028, and wherein when the cancer index for the individual is less than about 0.048 the individual is classified as not having CIN3 and/or cancer or as having a low risk of CIN3 and/or cancer development, and wherein the sensitivity of the assay is at least 80.00% and the specificity of the assay is at least 75.00%, preferably wherein the panel of one or more CpGs comprises at least three CpG from DMR 28, and more preferably wherein the cancer index value is the mean β-value for the CpGs denoted by [[CG]] in SEQ ID NO: 5028;
[1044] 57. CpGs whose cancer index value is determined are located within at least DMR 29 defined by SEQ ID NO: 5029, and wherein when the cancer index for the individual is about 0.022 or more the individual is classified as having CIN3 and/or cancer or as having a high risk of CIN3 and/or cancer development, and wherein the sensitivity of the assay is at least 79.00% and the specificity of the assay is at least 75.00%, preferably wherein the panel of one or more CpGs comprises at least five CpG from DMR 29, and more preferably wherein the cancer index value is the mean β-value for the CpGs denoted by [[CG]] in SEQ ID NO: 5029;
[1045] 58. CpGs whose cancer index value is determined are located within at least DMR 29 defined by SEQ ID NO: 5029, and wherein when the cancer index for the individual is less than about 0.022 the individual is classified as not having CIN3 and/or cancer or as having a low risk of CIN3 and/or cancer development, and wherein the sensitivity of the assay is at least 79.00% and the specificity of the assay is at least 75.00%, preferably wherein the panel of one or more CpGs comprises at least five CpG from DMR 29, and more preferably wherein the cancer index value is the mean β-value for the CpGs denoted by [[CG]] in SEQ ID NO: 5029;
[1046] 59. CpGs whose cancer index value is determined are located within at least DMR 30 defined by SEQ ID NO: 5030, and wherein when the cancer index for the individual is about 0.034 or more the individual is classified as having CIN3 and/or cancer or as having a high risk of CIN3 and/or cancer development, and wherein the sensitivity of the assay is at least 76.00% and the specificity of the assay is at least 75.00%, preferably wherein the panel of one or more CpGs comprises at least two CpG from DMR 30, and more preferably wherein the cancer index value is the mean β-value for the CpGs denoted by [[CG]] in SEQ ID NO: 5030;
[1047] 60. CpGs whose cancer index value is determined are located within at least DMR 30 defined by SEQ ID NO: 5030, and wherein when the cancer index for the individual is less than about 0.034 the individual is classified as not having CIN3 and/or cancer or as having a low risk of CIN3 and/or cancer development, and wherein the sensitivity of the assay is at least 76.00% and the specificity of the assay is at least 75.00%, preferably wherein the panel of one or more CpGs comprises at least two CpG from DMR 30, and more preferably wherein the cancer index value is the mean β-value for the CpGs denoted by [[CG]] in SEQ ID NO: 5030;
[1048] 61. CpGs whose cancer index value is determined are located within at least DMR 31 defined by SEQ ID NO: 5031, and wherein when the cancer index for the individual is about 0.03 or more the individual is classified as having CIN3 and/or cancer or as having a high risk of CIN3 and/or cancer development, and wherein the sensitivity of the assay is at least 79.00% and the specificity of the assay is at least 75.00%, preferably wherein the panel of one or more CpGs comprises at least ten CpG from DMR 31, and more preferably wherein the cancer index value is the mean β-value for the CpGs denoted by [[CG]] in SEQ ID NO: 5031;
[1049] 62. CpGs whose cancer index value is determined are located within at least DMR 31 defined by SEQ ID NO: 5031, and wherein when the cancer index for the individual is less than about 0.03 the individual is classified as not having CIN3 and/or cancer or as having a low risk of CIN3 and/or cancer development, and wherein the sensitivity of the assay is at least 79.00% and the specificity of the assay is at least 75.00%, preferably wherein the panel of one or more CpGs comprises at least ten CpG from DMR 31, and more preferably wherein the cancer index value is the mean β-value for the CpGs denoted by [[CG]] in SEQ ID NO: 5031;
[1050] 63. CpGs whose cancer index value is determined are located within at least DMR 32 defined by SEQ ID NO: 5032, and wherein when the cancer index for the individual is about 0.027 or more the individual is classified as having CIN3 and/or cancer or as having a high risk of CIN3 and/or cancer development, and wherein the sensitivity of the assay is at least 83.00% and the specificity of the assay is at least 75.00%, preferably wherein the panel of one or more CpGs comprises at least five CpG from DMR 32, and more preferably wherein the cancer index value is the mean β-value for the CpGs denoted by [[CG]] in SEQ ID NO: 5032;
[1051] 64. CpGs whose cancer index value is determined are located within at least DMR 32 defined by SEQ ID NO: 5032, and wherein when the cancer index for the individual is less than about 0.027 or more the individual is classified as having CIN3 and/or cancer or as having a high risk of CIN3 and/or cancer development, and wherein the sensitivity of the assay is at least 83.00% and the specificity of the assay is at least 75.00%, preferably wherein the panel of one or more CpGs comprises at least five CpG from DMR 32, and more preferably wherein the cancer index value is the mean β-value for the CpGs denoted by [[CG]] in SEQ ID NO: 5032;
[1052] 65. CpGs whose cancer index value is determined are located within at least DMR 33 defined by SEQ ID NO: 5033, and wherein when the cancer index for the individual is about 0.027 or more the individual is classified as having CIN3 and/or cancer or as having a high risk of CIN3 and/or cancer development, and wherein the sensitivity of the assay is at least 83.00% and the specificity of the assay is at least 75.00%, preferably wherein the panel of one or more CpGs comprises at least five CpG from DMR 33, and more preferably wherein the cancer index value is the mean β-value for the CpGs denoted by [[CG]] in SEQ ID NO: 5033;
[1053] 66. CpGs whose cancer index value is determined are located within at least DMR 33 defined by SEQ ID NO: 5033, and wherein when the cancer index for the individual is less than about 0.027 the individual is classified as not having CIN3 and/or cancer or as having a low risk of CIN3 and/or cancer development, and wherein the sensitivity of the assay is at least 83.00% and the specificity of the assay is at least 75.00%, preferably wherein the panel of one or more CpGs comprises at least five CpG from DMR 33, and more preferably wherein the cancer index value is the mean β-value for the CpGs denoted by [[CG]] in SEQ ID NO: 5033;
[1054] 67. CpGs whose cancer index value is determined are located within at least DMR 34 defined by SEQ ID NO: 5034, and wherein when the cancer index for the individual is about 0.041 or more the individual is classified as having CIN3 and/or cancer or as having a high risk of CIN3 and/or cancer development, and wherein the sensitivity of the assay is at least 74.00% and the specificity of the assay is at least 75.00%, preferably wherein the panel of one or more CpGs comprises at least ten CpG from DMR 34, and more preferably wherein the cancer index value is the mean β-value for the CpGs denoted by [[CG]] in SEQ ID NO: 5034;
[1055] 68. CpGs whose cancer index value is determined are located within at least DMR 34 defined by SEQ ID NO: 5034, and wherein when the cancer index for the individual is less than about 0.041 the individual is classified as not having CIN3 and/or cancer or as having a low risk of CIN3 and/or cancer development, and wherein the sensitivity of the assay is at least 74.00% and the specificity of the assay is at least 75.00%, preferably wherein the panel of one or more CpGs comprises at least ten CpG from DMR 34, and more preferably wherein the cancer index value is the mean β-value for the CpGs denoted by [[CG]] in SEQ ID NO: 5034;
[1056] 69. CpGs whose cancer index value is determined are located within at least DMR 35 defined by SEQ ID NO: 5035, and wherein when the cancer index for the individual is about 0.041 or more the individual is classified as having CIN3 and/or cancer or as having a high risk of CIN3 and/or cancer development, and wherein the sensitivity of the assay is at least 74.00% and the specificity of the assay is at least 75.00%, preferably wherein the panel of one or more CpGs comprises at least ten CpG from DMR 35, and more preferably wherein the cancer index value is the mean β-value for the CpGs denoted by [[CG]] in SEQ ID NO: 5035;
[1057] 70. CpGs whose cancer index value is determined are located within at least DMR 35 defined by SEQ ID NO: 5035, and wherein when the cancer index for the individual is less than about 0.041 the individual is classified as not having CIN3 and/or cancer or as having a low risk of CIN3 and/or cancer development, and wherein the sensitivity of the assay is at least 74.00% and the specificity of the assay is at least 75.00%, preferably wherein the panel of one or more CpGs comprises at least ten CpG from DMR 35, and more preferably wherein the cancer index value is the mean β-value for the CpGs denoted by [[CG]] in SEQ ID NO: 5035;
[1058] 71. CpGs whose cancer index value is determined are located within at least DMR 36 defined by SEQ ID NO: 5036, and wherein when the cancer index for the individual is about 0.026 or more the individual is classified as having CIN3 and/or cancer or as having a high risk of CIN3 and/or cancer development, and wherein the sensitivity of the assay is at least 80.00% and the specificity of the assay is at least 75.00%, preferably wherein the panel of one or more CpGs comprises at least ten CpG from DMR 36, and more preferably wherein the cancer index value is the mean β-value for the CpGs denoted by [[CG]] in SEQ ID NO: 5036;
[1059] 72. CpGs whose cancer index value is determined are located within at least DMR 36 defined by SEQ ID NO: 5036, and wherein when the cancer index for the individual is less than about 0.026 the individual is classified as not having CIN3 and/or cancer or as having a low risk of CIN3 and/or cancer development, and wherein the sensitivity of the assay is at least 80.00% and the specificity of the assay is at least 75.00%, preferably wherein the panel of one or more CpGs comprises at least ten CpG from DMR 36, and more preferably wherein the cancer index value is the mean β-value for the CpGs denoted by [[CG]] in SEQ ID NO: 5036;
[1060] 73. CpGs whose cancer index value is determined are located within at least DMR 37 defined by SEQ ID NO: 5037, and wherein when the cancer index for the individual is about 0.026 or more the individual is classified as having CIN3 and/or cancer or as having a high risk of CIN3 and/or cancer development, and wherein the sensitivity of the assay is at least 80.00% and the specificity of the assay is at least 75.00%, preferably wherein the panel of one or more CpGs comprises at least ten CpG from DMR 37, and more preferably wherein the cancer index value is the mean β-value for the CpGs denoted by [[CG]] in SEQ ID NO: 5037;
[1061] 74. CpGs whose cancer index value is determined are located within at least DMR 37 defined by SEQ ID NO: 5037, and wherein when the cancer index for the individual is less than about 0.026 the individual is classified as not having CIN3 and/or cancer or as having a low risk of CIN3 and/or cancer development, and wherein the sensitivity of the assay is at least 80.00% and the specificity of the assay is at least 75.00%, preferably wherein the panel of one or more CpGs comprises at least ten CpG from DMR 37, and more preferably wherein the cancer index value is the mean β-value for the CpGs denoted by [[CG]] in SEQ ID NO: 5037;
[1062] 75. CpGs whose cancer index value is determined are located within at least DMR 38 defined by SEQ ID NO: 5038, and wherein when the cancer index for the individual is about 0.026 or more the individual is classified as having CIN3 and/or cancer or as having a high risk of CIN3 and/or cancer development, and wherein the sensitivity of the assay is at least 80.00% and the specificity of the assay is at least 75.00%, preferably wherein the panel of one or more CpGs comprises at least ten CpG from DMR 38, and more preferably wherein the cancer index value is the mean β-value for the CpGs denoted by [[CG]] in SEQ ID NO: 5038;
[1063] 76. CpGs whose cancer index value is determined are located within at least DMR 38 defined by SEQ ID NO: 5038, and wherein when the cancer index for the individual is less than about 0.026 the individual is classified as not having CIN3 and/or cancer or as having a low risk of CIN3 and/or cancer development, and wherein the sensitivity of the assay is at least 80.00% and the specificity of the assay is at least 75.00%, DMR 38, and more preferably wherein the cancer index value is the mean β-value for the CpGs denoted by [[CG]] in SEQ ID NO: 5038;
[1064] 77. CpGs whose cancer index value is determined are located within at least DMR 39 defined by SEQ ID NO: 5039, and wherein when the cancer index for the individual is about 0.041 or more the individual is classified as having CIN3 and/or cancer or as having a high risk of CIN3 and/or cancer development, and wherein the sensitivity of the assay is at least 74.00% and the specificity of the assay is at least 75.00%, preferably wherein the panel of one or more CpGs comprises at least ten CpG from DMR 39, and more preferably wherein the cancer index value is the mean β-value for the CpGs denoted by [[CG]] in SEQ ID NO: 5039;
[1065] 78. CpGs whose cancer index value is determined are located within at least DMR 39 defined by SEQ ID NO: 5039, and wherein when the cancer index for the individual is less than about 0.041 the individual is classified as not having CIN3 and/or cancer or as having a low risk of CIN3 and/or cancer development, and wherein the sensitivity of the assay is at least 74.00% and the specificity of the assay is at least 75.00%, preferably wherein the panel of one or more CpGs comprises at least ten CpG from DMR 39, and more preferably wherein the cancer index value is the mean β-value for the CpGs denoted by [[CG]] in SEQ ID NO: 5039;
[1066] 79. CpGs whose cancer index value is determined are located within at least DMR 40 defined by SEQ ID NO: 5040, and wherein when the cancer index for the individual is about 0.041 or more the individual is classified as having CIN3 and/or cancer or as having a high risk of CIN3 and/or cancer development, and wherein the sensitivity of the assay is at least 74.00% and the specificity of the assay is at least 75.00%, preferably wherein the panel of one or more CpGs comprises at least ten CpG from DMR 40, and more preferably wherein the cancer index value is the mean β-value for the CpGs denoted by [[CG]] in SEQ ID NO: 5040;
[1067] 80. CpGs whose cancer index value is determined are located within at least DMR 40 defined by SEQ ID NO: 5040, and wherein when the cancer index for the individual is less than about 0.041 the individual is classified as not having CIN3 and/or cancer or as having a low risk of CIN3 and/or cancer development, and wherein the sensitivity of the assay is at least 74.00% and the specificity of the assay is at least 75.00%, preferably wherein the panel of one or more CpGs comprises at least ten CpG from DMR 40, and more preferably wherein the cancer index value is the mean β-value for the CpGs denoted by [[CG]] in SEQ ID NO: 5040;
[1068] 81. CpGs whose cancer index value is determined are located within at least DMR 41 defined by SEQ ID NO: 5041, and wherein when the cancer index for the individual is about 0.026 or more the individual is classified as having CIN3 and/or cancer or as having a high risk of CIN3 and/or cancer development, and wherein the sensitivity of the assay is at least 80.00% and the specificity of the assay is at least 75.00%, preferably wherein the panel of one or more CpGs comprises at least ten CpG from DMR 41, and more preferably wherein the cancer index value is the mean β-value for the CpGs denoted by [[CG]] in SEQ ID NO: 5041;
[1069] 82. CpGs whose cancer index value is determined are located within at least DMR 41 defined by SEQ ID NO: 5041, and wherein when the cancer index for the individual is less than about 0.026 the individual is classified as not having CIN3 and/or cancer or as having a low risk of CIN3 and/or cancer development, and wherein the sensitivity of the assay is at least 80.00% and the specificity of the assay is at least 75.00%, preferably wherein the panel of one or more CpGs comprises at least ten CpG from DMR 41, and more preferably wherein the cancer index value is the mean β-value for the CpGs denoted by [[CG]] in SEQ ID NO: 5041;
[1070] 83. CpGs whose cancer index value is determined are located within at least DMR 42 defined by SEQ ID NO: 5042, and wherein when the cancer index for the individual is about 0.041 or more the individual is classified as having CIN3 and/or cancer or as having a high risk of CIN3 and/or cancer development, and wherein the sensitivity of the assay is at least 74.00% and the specificity of the assay is at least 75.00%, preferably wherein the panel of one or more CpGs comprises at least ten CpG from DMR 42, and more preferably wherein the cancer index value is the mean β-value for the CpGs denoted by [[CG]] in SEQ ID NO: 5042;
[1071] 84. CpGs whose cancer index value is determined are located within at least DMR 42 defined by SEQ ID NO: 5042, and wherein when the cancer index for the individual is less than about 0.041 the individual is classified as not having CIN3 and/or cancer or as having a low risk of CIN3 and/or cancer development, and wherein the sensitivity of the assay is at least 74.00% and the specificity of the assay is at least 75.00%, preferably wherein the panel of one or more CpGs comprises at least ten CpG from DMR 42, and more preferably wherein the cancer index value is the mean β-value for the CpGs denoted by [[CG]] in SEQ ID NO: 5042;
[1072] 85. CpGs whose cancer index value is determined are located within at least DMR 43 defined by SEQ ID NO: 5043, and wherein when the cancer index for the individual is about 0.041 or more the individual is classified as having CIN3 and/or cancer or as having a high risk of CIN3 and/or cancer development, and wherein the sensitivity of the assay is at least 74.00% and the specificity of the assay is at least 75.00%, preferably wherein the panel of one or more CpGs comprises at least ten CpG from DMR 43, and more preferably wherein the cancer index value is the mean β-value for the CpGs denoted by [[CG]] in SEQ ID NO: 5043;
[1073] 86. CpGs whose cancer index value is determined are located within at least DMR 43 defined by SEQ ID NO: 5043, and wherein when the cancer index for the individual is less than about 0.041 the individual is classified as not having CIN3 and/or cancer or as having a low risk of CIN3 and/or cancer development, and wherein the sensitivity of the assay is at least 74.00% and the specificity of the assay is at least 75.00%, preferably wherein the panel of one or more CpGs comprises at least ten CpG from DMR 43, and more preferably wherein the cancer index value is the mean β-value for the CpGs denoted by [[CG]] in SEQ ID NO: 5043;
[1074] 87. CpGs whose cancer index value is determined are located within at least DMR 44 defined by SEQ ID NO: 5044, and wherein when the cancer index for the individual is about 0.041 or more the individual is classified as having CIN3 and/or cancer or as having a high risk of CIN3 and/or cancer development, and wherein the sensitivity of the assay is at least 74.00% and the specificity of the assay is at least 75.00%, preferably wherein the panel of one or more CpGs comprises at least ten CpG from DMR 44, and more preferably wherein the cancer index value is the mean β-value for the CpGs denoted by [[CG]] in SEQ ID NO: 5044;
[1075] 88. CpGs whose cancer index value is determined are located within at least DMR 44 defined by SEQ ID NO: 5044, and wherein when the cancer index for the individual is less than about 0.041 the individual is classified as not having CIN3 and/or cancer or as having a low risk of CIN3 and/or cancer development, and wherein the sensitivity of the assay is at least 74.00% and the specificity of the assay is at least 75.00%, preferably wherein the panel of one or more CpGs comprises at least ten CpG from DMR 44, and more preferably wherein the cancer index value is the mean β-value for the CpGs denoted by [[CG]] in SEQ ID NO: 5044;
[1076] 89. CpGs whose cancer index value is determined are located within at least DMR 45 defined by SEQ ID NO: 5045, and wherein when the cancer index for the individual is about 0.041 or more the individual is classified as having CIN3 and/or cancer or as having a high risk of CIN3 and/or cancer development, and wherein the sensitivity of the assay is at least 76.00% and the specificity of the assay is at least 75.00%, preferably wherein the panel of one or more CpGs comprises at least nine CpG from DMR 45, and more preferably wherein the cancer index value is the mean β-value for the CpGs denoted by [[CG]] in SEQ ID NO: 5045;
[1077] 90. CpGs whose cancer index value is determined are located within at least DMR 45 defined by SEQ ID NO: 5045, and wherein when the cancer index for the individual is less than about 0.041 the individual is classified as not having CIN3 and/or cancer or as having a low risk of CIN3 and/or cancer development, and wherein the sensitivity of preferably wherein the panel of one or more CpGs comprises at least nine CpG from DMR 45, and more preferably wherein the cancer index value is the mean β-value for the CpGs denoted by [[CG]] in SEQ ID NO: 5045;
[1078] 91. CpGs whose cancer index value is determined are located within at least DMR 46 defined by SEQ ID NO: 5046, and wherein when the cancer index for the individual is about 0.038 or more the individual is classified as having CIN3 and/or cancer or as having a high risk of CIN3 and/or cancer development, and wherein the sensitivity of the assay is at least 74.00% and the specificity of the assay is at least 75.00%, preferably wherein the panel of one or more CpGs comprises at least three CpG from DMR 46, and more preferably wherein the cancer index value is the mean β-value for the CpGs denoted by [[CG]] in SEQ ID NO: 5046;
[1079] 92. CpGs whose cancer index value is determined are located within at least DMR 46 defined by SEQ ID NO: 5046, and wherein when the cancer index for the individual is less than about 0.038 the individual is classified as not having CIN3 and/or cancer or as having a low risk of CIN3 and/or cancer development, and wherein the sensitivity of the assay is at least 74.00% and the specificity of the assay is at least 75.00%, preferably wherein the panel of one or more CpGs comprises at least three CpG from DMR 46, and more preferably wherein the cancer index value is the mean β-value for the CpGs denoted by [[CG]] in SEQ ID NO: 5046;
[1080] 93. CpGs whose cancer index value is determined are located within at least DMR 47 defined by SEQ ID NO: 5047, and wherein when the cancer index for the individual is about 0.029 or more the individual is classified as having CIN3 and/or cancer or as having a high risk of CIN3 and/or cancer development, and wherein the sensitivity of the assay is at least 77.00% and the specificity of the assay is at least 75.00%, preferably wherein the panel of one or more CpGs comprises at least eleven CpG from DMR 47, and more preferably wherein the cancer index value is the mean β-value for the CpGs denoted by [[CG]] in SEQ ID NO: 5047;
[1081] 94. CpGs whose cancer index value is determined are located within at least DMR 47 defined by SEQ ID NO: 5047, and wherein when the cancer index for the individual is less than about 0.029 the individual is classified as not having CIN3 and/or cancer or as having a low risk of CIN3 and/or cancer development, and wherein the sensitivity of the assay is at least 77.00% and the specificity of the assay is at least 75.00%, preferably wherein the panel of one or more CpGs comprises at least eleven CpG from DMR 47, and more preferably wherein the cancer index value is the mean β-value for the CpGs denoted by [[CG]] in SEQ ID NO: 5047;
[1082] 95. CpGs whose cancer index value is determined are located within at least DMR 48 defined by SEQ ID NO: 5048, and wherein when the cancer index for the individual is about 0.028 or more the individual is classified as having CIN3 and/or cancer or as having a high risk of CIN3 and/or cancer development, and wherein the sensitivity of the assay is at least 83.00% and the specificity of the assay is at least 75.00%, preferably wherein the panel of one or more CpGs comprises at least six CpG from DMR 48, and more preferably wherein the cancer index value is the mean β-value for the CpGs denoted by [[CG]] in SEQ ID NO: 5048;
[1083] 96. CpGs whose cancer index value is determined are located within at least DMR 48 defined by SEQ ID NO: 5048, and wherein when the cancer index for the individual is less than about 0.028 the individual is classified as not having CIN3 and/or cancer or as having a low risk of CIN3 and/or cancer development, and wherein the sensitivity of the assay is at least 83.00% and the specificity of the assay is at least 75.00%, preferably wherein the panel of one or more CpGs comprises at least six CpG from DMR 48, and more preferably wherein the cancer index value is the mean β-value for the CpGs denoted by [[CG]] in SEQ ID NO: 5048;
[1084] 97. CpGs whose cancer index value is determined are located within at least DMR 49 defined by SEQ ID NO: 5049, and wherein when the cancer index for the individual is about 0.028 or more the individual is classified as having CIN3 and/or cancer or as having a high risk of CIN3 and/or cancer development, and wherein the sensitivity of the assay is at least 83.00% and the specificity of the assay is at least 75.00%, preferably wherein the panel of one or more CpGs comprises at least six CpG from DMR 49, and more preferably wherein the cancer index value is the mean β-value for the CpGs denoted by [[CG]] in SEQ ID NO: 5049;
[1085] 98. CpGs whose cancer index value is determined are located within at least DMR 49 defined by SEQ ID NO: 5049, and wherein when the cancer index for the individual is less than about 0.028 the individual is classified as not having CIN3 and/or cancer or as having a low risk of CIN3 and/or cancer development, and wherein the sensitivity of the assay is at least 83.00% and the specificity of the assay is at least 75.00%, preferably wherein the panel of one or more CpGs comprises at least six CpG from DMR 49, and more preferably wherein the cancer index value is the mean β-value for the CpGs denoted by [[CG]] in SEQ ID NO: 5049;
[1086] 99. CpGs whose cancer index value is determined are located within at least DMR 50 defined by SEQ ID NO: 5050, and wherein when the cancer index for the individual is about 0.028 or more the individual is classified as having CIN3 and/or cancer or as having a high risk of CIN3 and/or cancer development, and wherein the sensitivity of the assay is at least 83.00% and the specificity of the assay is at least 75.00%, DMR 50, and more preferably wherein the cancer index value is the mean β-value for the CpGs denoted by [[CG]] in SEQ ID NO: 5050;
[1087] 100. CpGs whose cancer index value is determined are located within at least DMR 50 defined by SEQ ID NO: 5050, and wherein when the cancer index for the individual is less than about 0.028 the individual is classified as not having CIN3 and/or cancer or as having a low risk of CIN3 and/or cancer development, and wherein the sensitivity of the assay is at least 83.00% and the specificity of the assay is at least 75.00%, preferably wherein the panel of one or more CpGs comprises at least six CpG from DMR 50, and more preferably wherein the cancer index value is the mean β-value for the CpGs denoted by [[CG]] in SEQ ID NO: 5050;
[1088] 101. CpGs whose cancer index value is determined are located within at least DMR 51 defined by SEQ ID NO: 5051, and wherein when the cancer index for the individual is about 0.034 or more the individual is classified as having CIN3 and/or cancer or as having a high risk of CIN3 and/or cancer development, and wherein the sensitivity of the assay is at least 76.00% and the specificity of the assay is at least 75.00%, preferably wherein the panel of one or more CpGs comprises at least six CpG from DMR 51, and more preferably wherein the cancer index value is the mean β-value for the CpGs denoted by [[CG]] in SEQ ID NO: 5051;
[1089] 102. CpGs whose cancer index value is determined are located within at least DMR 51 defined by SEQ ID NO: 5051, and wherein when the cancer index for the individual is less than about 0.034 the individual is classified as not having CIN3 and/or cancer or as having a low risk of CIN3 and/or cancer development, and wherein the sensitivity of the assay is at least 76.00% and the specificity of the assay is at least 75.00%, preferably wherein the panel of one or more CpGs comprises at least six CpG from DMR 51, and more preferably wherein the cancer index value is the mean β-value for the CpGs denoted by [[CG]] in SEQ ID NO: 5051;
[1090] 103. CpGs whose cancer index value is determined are located within at least DMR 52 defined by SEQ ID NO: 5052, and wherein when the cancer index for the individual is about 0.034 or more the individual is classified as having CIN3 and/or cancer or as having a high risk of CIN3 and/or cancer development, and wherein the sensitivity of the assay is at least 76.00% and the specificity of the assay is at least 75.00%, preferably wherein the panel of one or more CpGs comprises at least six CpG from DMR 52, and more preferably wherein the cancer index value is the mean β-value for the CpGs denoted by [[CG]] in SEQ ID NO: 5052;
[1091] 104. CpGs whose cancer index value is determined are located within at least DMR 52 defined by SEQ ID NO: 5052, and wherein when the cancer index for the individual is less than about 0.034 the individual is classified as not having CIN3 and/or cancer or as having a low risk of CIN3 and/or cancer development, and wherein the sensitivity of the assay is at least 76.00% and the specificity of the assay is at least 75.00%, preferably wherein the panel of one or more CpGs comprises at least six CpG from DMR 52, and more preferably wherein the cancer index value is the mean β-value for the CpGs denoted by [[CG]] in SEQ ID NO: 5052;
[1092] 105. CpGs whose cancer index value is determined are located within at least DMR 53 defined by SEQ ID NO: 5053, and wherein when the cancer index for the individual is about 0.036 or more the individual is classified as having CIN3 and/or cancer or as having a high risk of CIN3 and/or cancer development, and wherein the sensitivity of the assay is at least 82.00% and the specificity of the assay is at least 75.00%, preferably wherein the panel of one or more CpGs comprises at least three CpG from DMR 53, and more preferably wherein the cancer index value is the mean β-value for the CpGs denoted by [[CG]] in SEQ ID NO: 5053;
[1093] 106. CpGs whose cancer index value is determined are located within at least DMR 53 defined by SEQ ID NO: 5053, and wherein when the cancer index for the individual is less than about 0.036 the individual is classified as not having CIN3 and/or cancer or as having a low risk of CIN3 and/or cancer development, and wherein the sensitivity of the assay is at least 82.00% and the specificity of the assay is at least 75.00%, preferably wherein the panel of one or more CpGs comprises at least three CpG from DMR 53, and more preferably wherein the cancer index value is the mean β-value for the CpGs denoted by [[CG]] in SEQ ID NO: 5053;
[1094] 107. CpGs whose cancer index value is determined are located within at least DMR 54 defined by SEQ ID NO: 5054, and wherein when the cancer index for the individual is about 0.036 or more the individual is classified as having CIN3 and/or cancer or as having a high risk of CIN3 and/or cancer development, and wherein the sensitivity of the assay is at least 82.00% and the specificity of the assay is at least 75.00%, preferably wherein the panel of one or more CpGs comprises at least three CpG from DMR 54, and more preferably wherein the cancer index value is the mean β-value for the CpGs denoted by [[CG]] in SEQ ID NO: 5054;
[1095] 108. CpGs whose cancer index value is determined are located within at least DMR 54 defined by SEQ ID NO: 5054, and wherein when the cancer index for the individual is less than about 0.036 the individual is classified as not having CIN3 and/or cancer or as having a low risk of CIN3 and/or cancer development, and wherein the sensitivity of the assay is at least 82.00% and the specificity of the assay is at least 75.00%, preferably wherein the panel of one or more CpGs comprises at least three CpG from DMR 54, and more preferably wherein the cancer index value is the mean β-value for the CpGs denoted by [[CG]] in SEQ ID NO: 5054;
[1096] 109. CpGs whose cancer index value is determined are located within at least DMR 55 defined by SEQ ID NO: 5055, and wherein when the cancer index for the individual is about 0.05 or more the individual is classified as having CIN3 and/or cancer or as having a high risk of CIN3 and/or cancer development, and wherein the sensitivity of the assay is at least 76.00% and the specificity of the assay is at least 75.00%, preferably wherein the panel of one or more CpGs comprises at least two CpG from DMR 55, and more preferably wherein the cancer index value is the mean β-value for the CpGs denoted by [[CG]] in SEQ ID NO: 5055;
[1097] 110. CpGs whose cancer index value is determined are located within at least DMR 55 defined by SEQ ID NO: 5055, and wherein when the cancer index for the individual is less than about 0.05 the individual is classified as not having CIN3 and/or cancer or as having a low risk of CIN3 and/or cancer development, and wherein the sensitivity of the assay is at least 76.00% and the specificity of the assay is at least 75.00%, preferably wherein the panel of one or more CpGs comprises at least two CpG from DMR 55, and more preferably wherein the cancer index value is the mean β-value for the CpGs denoted by [[CG]] in SEQ ID NO: 5055;
[1098] 111. CpGs whose cancer index value is determined are located within at least DMR 56 defined by SEQ ID NO: 5056, and wherein when the cancer index for the individual is about 0.016 or more the individual is classified as having CIN3 and/or cancer or as having a high risk of CIN3 and/or cancer development, and wherein the sensitivity of the assay is at least 77.00% and the specificity of the assay is at least 75.00%, preferably wherein the panel of one or more CpGs comprises at least three CpG from DMR 56, and more preferably wherein the cancer index value is the mean β-value for the CpGs denoted by [[CG]] in SEQ ID NO: 5056;
[1099] 112. CpGs whose cancer index value is determined are located within at least DMR 56 defined by SEQ ID NO: 5056, and wherein when the cancer index for the individual is less than about 0.016 the individual is classified as not having CIN3 and/or cancer or as having a low risk of CIN3 and/or cancer development, and wherein the sensitivity of the assay is at least 77.00% and the specificity of the assay is at least 75.00%, preferably wherein the panel of one or more CpGs comprises at least three CpG from DMR 56, and more preferably wherein the cancer index value is the mean β-value for the CpGs denoted by [[CG]] in SEQ ID NO: 5056;
[1100] 113. CpGs whose cancer index value is determined are located within at least DMR 57 defined by SEQ ID NO: 5057, and wherein when the cancer index for the individual is about 0.036 or more the individual is classified as having CIN3 and/or cancer or as having a high risk of CIN3 and/or cancer development, and wherein the sensitivity of the assay is at least 82.00% and the specificity of the assay is at least 75.00%, preferably wherein the panel of one or more CpGs comprises at least three CpG from DMR 57, and more preferably wherein the cancer index value is the mean β-value for the CpGs denoted by [[CG]] in SEQ ID NO: 5057;
[1101] 114. CpGs whose cancer index value is determined are located within at least DMR 57 defined by SEQ ID NO: 5057, and wherein when the cancer index for the individual is less than about 0.036 the individual is classified as not having CIN3 and/or cancer or as having a low risk of CIN3 and/or cancer development, and wherein the sensitivity of the assay is at least 82.00% and the specificity of the assay is at least 75.00%, preferably wherein the panel of one or more CpGs comprises at least three CpG from DMR 57, and more preferably wherein the cancer index value is the mean β-value for the CpGs denoted by [[CG]] in SEQ ID NO: 5057;
[1102] 115. CpGs whose cancer index value is determined are located within at least DMR 58 defined by SEQ ID NO: 5058, and wherein when the cancer index for the individual is about 0.085 or more the individual is classified as having CIN3 and/or cancer or as having a high risk of CIN3 and/or cancer development, and wherein the sensitivity of the assay is at least 77.00% and the specificity of the assay is at least 75.00%, preferably wherein the panel of one or more CpGs comprises at least one CpG from DMR 58, and more preferably wherein the cancer index value is the mean β-value for the CpGs denoted by [[CG]] in SEQ ID NO: 5058;
[1103] 116. CpGs whose cancer index value is determined are located within at least DMR 58 defined by SEQ ID NO: 5058, and wherein when the cancer index for the individual is less than about 0.085 or more the individual is classified as not having cancer or as having a high risk of cancer development, and wherein the sensitivity of the assay is at least 77.00% and the specificity of the assay is at least 75.00%, preferably wherein the panel of one or more CpGs comprises at least one CpG from DMR 58, and more preferably wherein the cancer index value is the mean β-value for the CpGs denoted by [[CG]] in SEQ ID NO: 5058;
[1104] 117. CpGs whose cancer index value is determined are located within at least DMR 59 defined by SEQ ID NO: 5059, and wherein when the cancer index for the individual is about 0.028 or more the individual is classified as having CIN3 and/or cancer or as having a high risk of CIN3 and/or cancer development, and wherein the sensitivity of the assay is at least 80.00% and the specificity of the assay is at least 75.00%, preferably wherein the panel of one or more CpGs comprises at least three CpG from DMR 59, and more preferably wherein the cancer index value is the mean β-value for the CpGs denoted by [[CG]] in SEQ ID NO: 5059;
[1105] 118. CpGs whose cancer index value is determined are located within at least DMR 59 defined by SEQ ID NO: 5059, and wherein when the cancer index for the individual is less than about 0.028 the individual is classified as not having CIN3 and/or cancer or as having a low risk of CIN3 and/or cancer development, and wherein the sensitivity of the assay is at least 80.00% and the specificity of the assay is at least 75.00%, preferably wherein the panel of one or more CpGs comprises at least three CpG from DMR 59, and more preferably wherein the cancer index value is the mean β-value for the CpGs denoted by [[CG]] in SEQ ID NO: 5059;
[1106] 119. CpGs whose cancer index value is determined are located within at least DMR 60 defined by SEQ ID NO: 5060, and wherein when the cancer index for the individual is about 0.042 or more the individual is classified as having CIN3 and/or cancer or as having a high risk of CIN3 and/or cancer development, and wherein the sensitivity of the assay is at least 80.00% and the specificity of the assay is at least 75.00%, preferably wherein the panel of one or more CpGs comprises at least three CpG from DMR 60, and more preferably wherein the cancer index value is the mean β-value for the CpGs denoted by [[CG]] in SEQ ID NO: 5060;
[1107] 120. CpGs whose cancer index value is determined are located within at least DMR 60 defined by SEQ ID NO: 5060, and wherein when the cancer index for the individual is less than about 0.042 the individual is classified as not having CIN3 and/or cancer or as having a low risk of CIN3 and/or cancer development, and wherein the sensitivity of the assay is at least 80.00% and the specificity of the assay is at least 75.00%, preferably wherein the panel of one or more CpGs comprises at least three CpG from DMR 60, and more preferably wherein the cancer index value is the mean β-value for the CpGs denoted by [[CG]] in SEQ ID NO: 5060;
[1108] 121. CpGs whose cancer index value is determined are located within at least DMR 61 defined by SEQ ID NO: 5061, and wherein when the cancer index for the individual is about 0.037 or more the individual is classified as having CIN3 and/or cancer or as having a high risk of CIN3 and/or cancer development, and wherein the sensitivity of the assay is at least 77.00% and the specificity of the assay is at least 75.00%, preferably wherein the panel of one or more CpGs comprises at least four CpG from DMR 61, and more preferably wherein the cancer index value is the mean β-value for the CpGs denoted by [[CG]] in SEQ ID NO: 5061;
[1109] 122. CpGs whose cancer index value is determined are located within at least DMR 61 defined by SEQ ID NO: 5061, and wherein when the cancer index for the individual is less than about 0.037 the individual is classified as not having CIN3 and/or cancer or as having a low risk of CIN3 and/or cancer development, and wherein the sensitivity of the assay is at least 77.00% and the specificity of the assay is at least 75.00%, DMR 61, and more preferably wherein the cancer index value is the mean β-value for the CpGs denoted by [[CG]] in SEQ ID NO: 5061;
[1110] 123. CpGs whose cancer index value is determined are located within at least DMR 62 defined by SEQ ID NO: 5062, and wherein when the cancer index for the individual is about 0.057 or more the individual is classified as having CIN3 and/or cancer or as having a high risk of CIN3 and/or cancer development, and wherein the sensitivity of the assay is at least 77.00% and the specificity of the assay is at least 75.00%, preferably wherein the panel of one or more CpGs comprises at least two CpG from DMR 62, and more preferably wherein the cancer index value is the mean β-value for the CpGs denoted by [[CG]] in SEQ ID NO: 5062;
[1111] 124. CpGs whose cancer index value is determined are located within at least DMR 62 defined by SEQ ID NO: 5062, and wherein when the cancer index for the individual is less than about 0.057 the individual is classified as not having CIN3 and/or cancer or as having a low risk of CIN3 and/or cancer development, and wherein the sensitivity of the assay is at least 77.00% and the specificity of the assay is at least 75.00%, preferably wherein the panel of one or more CpGs comprises at least two CpG from DMR 62, and more preferably wherein the cancer index value is the mean β-value for the CpGs denoted by [[CG]] in SEQ ID NO: 5062;
[1112] 125. CpGs whose cancer index value is determined are located within at least DMR 63 defined by SEQ ID NO: 5063, and wherein when the cancer index for the individual is about 0.031 or more the individual is classified as having CIN3 and/or cancer or as having a high risk of CIN3 and/or cancer development, and wherein the sensitivity of the assay is at least 77.00% and the specificity of the assay is at least 75.00%, preferably wherein the panel of one or more CpGs comprises at least eleven CpG from DMR 63, and more preferably wherein the cancer index value is the mean β-value for the CpGs denoted by [[CG]] in SEQ ID NO: 5063;
[1113] 126. CpGs whose cancer index value is determined are located within at least DMR 63 defined by SEQ ID NO: 5063, and wherein when the cancer index for the individual is less than about 0.031 the individual is classified as not having CIN3 and/or cancer or as having a low risk of CIN3 and/or cancer development, and wherein the sensitivity of the assay is at least 77.00% and the specificity of the assay is at least 75.00%, preferably wherein the panel of one or more CpGs comprises at least eleven CpG from DMR 63, and more preferably wherein the cancer index value is the mean β-value for the CpGs denoted by [[CG]] in SEQ ID NO: 5063;
[1114] 127. CpGs whose cancer index value is determined are located within at least DMR 64 defined by SEQ ID NO: 5064, and wherein when the cancer index for the individual is about 0.031 or more the individual is classified as having CIN3 and/or cancer or as having a high risk of CIN3 and/or cancer development, and wherein the sensitivity of the assay is at least 77.00% and the specificity of the assay is at least 75.00%, preferably wherein the panel of one or more CpGs comprises at least eleven CpG from DMR 64, and more preferably wherein the cancer index value is the mean β-value for the CpGs denoted by [[CG]] in SEQ ID NO: 5064;
[1115] 128. CpGs whose cancer index value is determined are located within at least DMR 64 defined by SEQ ID NO: 5064, and wherein when the cancer index for the individual is less than about 0.031 the individual is classified as not having CIN3 and/or cancer or as having a low risk of CIN3 and/or cancer development, and wherein the sensitivity of the assay is at least 77.00% and the specificity of the assay is at least 75.00%, preferably wherein the panel of one or more CpGs comprises at least eleven CpG from DMR 64, and more preferably wherein the cancer index value is the mean β-value for the CpGs denoted by [[CG]] in SEQ ID NO: 5064;
[1116] 129. CpGs whose cancer index value is determined are located within at least DMR 65 defined by SEQ ID NO: 5065, and wherein when the cancer index for the individual is about 0.031 or more the individual is classified as having CIN3 and/or cancer or as having a high risk of CIN3 and/or cancer development, and wherein the sensitivity of the assay is at least 77.00% and the specificity of the assay is at least 75.00%, preferably wherein the panel of one or more CpGs comprises at least eleven CpG from DMR 65, and more preferably wherein the cancer index value is the mean β-value for the CpGs denoted by [[CG]] in SEQ ID NO: 5065;
[1117] 130. CpGs whose cancer index value is determined are located within at least DMR 65 defined by SEQ ID NO: 5065, and wherein when the cancer index for the individual is less than about 0.031 the individual is classified as not having CIN3 and/or cancer or as having a low risk of CIN3 and/or cancer development, and wherein the sensitivity of the assay is at least 77.00% and the specificity of the assay is at least 75.00%, preferably wherein the panel of one or more CpGs comprises at least eleven CpG from DMR 65, and more preferably wherein the cancer index value is the mean β-value for the CpGs denoted by [[CG]] in SEQ ID NO: 5065;
[1118] 131. CpGs whose cancer index value is determined are located within at least DMR 66 defined by SEQ ID NO: 5066, and wherein when the cancer index for the individual is about 0.031 or more the individual is classified as having CIN3 and/or cancer or as having a high risk of CIN3 and/or cancer development, and wherein the sensitivity of the assay is at least 77.00% and the specificity of the assay is at least 75.00%, preferably wherein the panel of one or more CpGs comprises at least eleven CpG from DMR 66, and more preferably wherein the cancer index value is the mean β-value for the CpGs denoted by [[CG]] in SEQ ID NO: 5066;
[1119] 132. CpGs whose cancer index value is determined are located within at least DMR 66 defined by SEQ ID NO: 5066, and wherein when the cancer index for the individual is less than about 0.031 the individual is classified as not having CIN3 and/or cancer or as having a low risk of CIN3 and/or cancer development, and wherein the sensitivity of the assay is at least 77.00% and the specificity of the assay is at least 75.00%, preferably wherein the panel of one or more CpGs comprises at least eleven CpG from DMR 66, and more preferably wherein the cancer index value is the mean β-value for the CpGs denoted by [[CG]] in SEQ ID NO: 5066;
[1120] 133. CpGs whose cancer index value is determined are located within at least DMR 67 defined by SEQ ID NO: 5067, and wherein when the cancer index for the individual is about 0.041 or more the individual is classified as having CIN3 and/or cancer or as having a high risk of CIN3 and/or cancer development, and wherein the sensitivity of the assay is at least 77.00% and the specificity of the assay is at least 75.00%, preferably wherein the panel of one or more CpGs comprises at least five CpG from DMR 67, and more preferably wherein the cancer index value is the mean β-value for the CpGs denoted by [[CG]] in SEQ ID NO: 5067;
[1121] 134. CpGs whose cancer index value is determined are located within at least DMR 67 defined by SEQ ID NO: 5067, and wherein when the cancer index for the individual is less than about 0.041 the individual is classified as not having CIN3 and/or cancer or as having a low risk of CIN3 and/or cancer development, and wherein the sensitivity of the assay is at least 77.00% and the specificity of the assay is at least 75.00%, preferably wherein the panel of one or more CpGs comprises at least five CpG from DMR 67, and more preferably wherein the cancer index value is the mean β-value for the CpGs denoted by [[CG]] in SEQ ID NO: 5067;
[1122] 135. CpGs whose cancer index value is determined are located within at least DMR 68 defined by SEQ ID NO: 5068, and wherein when the cancer index for the individual is about 0.037 or more the individual is classified as having CIN3 and/or cancer or as having a high risk of CIN3 and/or cancer development, and wherein the sensitivity of the assay is at least 79.00% and the specificity of the assay is at least 75.00%, preferably wherein the panel of one or more CpGs comprises at least four CpG from DMR 68, and more preferably wherein the cancer index value is the mean β-value for the CpGs denoted by [[CG]] in SEQ ID NO: 5068;
[1123] 136. CpGs whose cancer index value is determined are located within at least DMR 68 defined by SEQ ID NO: 5068, and wherein when the cancer index for the individual is less than about 0.037 the individual is classified as not having CIN3 and/or cancer or as having a low risk of CIN3 and/or cancer development, and wherein the sensitivity of the assay is at least 79.00% and the specificity of the assay is at least 75.00%, preferably wherein the panel of one or more CpGs comprises at least four CpG from DMR 68, and more preferably wherein the cancer index value is the mean β-value for the CpGs denoted by [[CG]] in SEQ ID NO: 5068;
[1124] 137. CpGs whose cancer index value is determined are located within at least DMR 69 defined by SEQ ID NO: 5069, and wherein when the cancer index for the individual is about 0.05 or more the individual is classified as having CIN3 and/or cancer or as having a high risk of CIN3 and/or cancer development, and wherein the sensitivity of the assay is at least 82.00% and the specificity of the assay is at least 75.00%, preferably wherein the panel of one or more CpGs comprises at least three CpG from DMR 69, and more preferably wherein the cancer index value is the mean β-value for the CpGs denoted by [[CG]] in SEQ ID NO: 5069;
[1125] 138. CpGs whose cancer index value is determined are located within at least DMR 69 defined by SEQ ID NO: 5069, and wherein when the cancer index for the individual is less than about 0.05 the individual is classified as not having CIN3 and/or cancer or as having a low risk of CIN3 and/or cancer development, and wherein the sensitivity of the assay is at least 82.00% and the specificity of the assay is at least 75.00%, preferably wherein the panel of one or more CpGs comprises at least three CpG from DMR 69, and more preferably wherein the cancer index value is the mean β-value for the CpGs denoted by [[CG]] in SEQ ID NO: 5069;
[1126] 139. CpGs whose cancer index value is determined are located within at least DMR 70 defined by SEQ ID NO: 5070, and wherein when the cancer index for the individual is about 0.049 or more the individual is classified as having CIN3 and/or cancer or as having a high risk of CIN3 and/or cancer development, and wherein the sensitivity of the assay is at least 77.00% and the specificity of the assay is at least 75.00%, preferably wherein the panel of one or more CpGs comprises at least three CpG from DMR 70, and more preferably wherein the cancer index value is the mean β-value for the CpGs denoted by [[CG]] in SEQ ID NO: 5070;
[1127] 140. CpGs whose cancer index value is determined are located within at least DMR 70 defined by SEQ ID NO: 5070, and wherein when the cancer index for the individual is less than about 0.049 the individual is classified as not having CIN3 and/or cancer or as having a low risk of CIN3 and/or cancer development, and wherein the sensitivity of the assay is at least 77.00% and the specificity of the assay is at least 75.00%, preferably wherein the panel of one or more CpGs comprises at least three CpG from DMR 70, and more preferably wherein the cancer index value is the mean β-value for the CpGs denoted by [[CG]] in SEQ ID NO: 5070;
[1128] 141. CpGs whose cancer index value is determined are located within at least DMR 71 defined by SEQ ID NO: 5071, and wherein when the cancer index for the individual is about 0.041 or more the individual is classified as having CIN3 and/or cancer or as having a high risk of CIN3 and/or cancer development, and wherein the sensitivity of the assay is at least 70.00% and the specificity of the assay is at least 75.00%, preferably wherein the panel of one or more CpGs comprises at least six CpG from DMR 71, and more preferably wherein the cancer index value is the mean β-value for the CpGs denoted by [[CG]] in SEQ ID NO: 5071;
[1129] 142. CpGs whose cancer index value is determined are located within at least DMR 71 defined by SEQ ID NO: 5071, and wherein when the cancer index for the individual is less than about 0.041 the individual is classified as not having CIN3 and/or cancer or as having a low risk of CIN3 and/or cancer development, and wherein the sensitivity of the assay is at least 70.00% and the specificity of the assay is at least 75.00%, preferably wherein the panel of one or more CpGs comprises at least six CpG from DMR 71, and more preferably wherein the cancer index value is the mean β-value for the CpGs denoted by [[CG]] in SEQ ID NO: 5071;
[1130] 143. CpGs whose cancer index value is determined are located within at least DMR 72 defined by SEQ ID NO: 5072, and wherein when the cancer index for the individual is about 0.06 or more the individual is classified as having CIN3 and/or cancer or as having a high risk of CIN3 and/or cancer development, and wherein the sensitivity of the assay is at least 77.00% and the specificity of the assay is at least 75.00%, preferably wherein the panel of one or more CpGs comprises at least three CpG from DMR 72, and more preferably wherein the cancer index value is the mean β-value for the CpGs denoted by [[CG]] in SEQ ID NO: 5072;
[1131] 144. CpGs whose cancer index value is determined are located within at least DMR 72 defined by SEQ ID NO: 5072, and wherein when the cancer index for the individual is less than about 0.06 the individual is classified as not having CIN3 and/or cancer or as having a low risk of CIN3 and/or cancer development, and wherein the sensitivity of the assay is at least 77.00% and the specificity of the assay is at least 75.00%, preferably wherein the panel of one or more CpGs comprises at least three CpG from DMR 72, and more preferably wherein the cancer index value is the mean β-value for the CpGs denoted by [[CG]] in SEQ ID NO: 5072;
[1132] 145. CpGs whose cancer index value is determined are located within at least DMR 73 defined by SEQ ID NO: 5073, and wherein when the cancer index for the individual is about 0.042 or more the individual is classified as having CIN3 and/or cancer or as having a high risk of CIN3 and/or cancer development, and wherein the sensitivity of the assay is at least 79.00% and the specificity of the assay is at least 75.00%, DMR 73, and more preferably wherein the cancer index value is the mean β-value for the CpGs denoted by [[CG]] in SEQ ID NO: 5073;
[1133] 146. CpGs whose cancer index value is determined are located within at least DMR 73 defined by SEQ ID NO: 5073, and wherein when the cancer index for the individual is less than about 0.042 the individual is classified as not having CIN3 and/or cancer or as having a low risk of CIN3 and/or cancer development, and wherein the sensitivity of the assay is at least 79.00% and the specificity of the assay is at least 75.00%, preferably wherein the panel of one or more CpGs comprises at least four CpG from DMR 73, and more preferably wherein the cancer index value is the mean β-value for the CpGs denoted by [[CG]] in SEQ ID NO: 5073;
[1134] 147. CpGs whose cancer index value is determined are located within at least DMR 74 defined by SEQ ID NO: 5074, and wherein when the cancer index for the individual is about 0.042 or more the individual is classified as having CIN3 and/or cancer or as having a high risk of CIN3 and/or cancer development, and wherein the sensitivity of the assay is at least 79.00% and the specificity of the assay is at least 75.00%, preferably wherein the panel of one or more CpGs comprises at least four CpG from DMR 74, and more preferably wherein the cancer index value is the mean β-value for the CpGs denoted by [[CG]] in SEQ ID NO: 5074;
[1135] 148. CpGs whose cancer index value is determined are located within at least DMR 74 defined by SEQ ID NO: 5074, and wherein when the cancer index for the individual is less than about 0.042 the individual is classified as not having CIN3 and/or cancer or as having a low risk of CIN3 and/or cancer development, and wherein the sensitivity of the assay is at least 79.00% and the specificity of the assay is at least 75.00%, preferably wherein the panel of one or more CpGs comprises at least four CpG from DMR 74, and more preferably wherein the cancer index value is the mean β-value for the CpGs denoted by [[CG]] in SEQ ID NO: 5074;
[1136] 149. CpGs whose cancer index value is determined are located within at least DMR 75 defined by SEQ ID NO: 5075, and wherein when the cancer index for the individual is about 0.042 or more the individual is classified as having CIN3 and/or cancer or as having a high risk of CIN3 and/or cancer development, and wherein the sensitivity of the assay is at least 79.00% and the specificity of the assay is at least 75.00%, preferably wherein the panel of one or more CpGs comprises at least four CpG from DMR 75, and more preferably wherein the cancer index value is the mean β-value for the CpGs denoted by [[CG]] in SEQ ID NO: 5075;
[1137] 150. CpGs whose cancer index value is determined are located within at least DMR 75 defined by SEQ ID NO: 5075, and wherein when the cancer index for the individual is less than about 0.042 the individual is classified as not having CIN3 and/or cancer or as having a low risk of CIN3 and/or cancer development, and wherein the sensitivity of the assay is at least 79.00% and the specificity of the assay is at least 75.00%, preferably wherein the panel of one or more CpGs comprises at least four CpG from DMR 75, and more preferably wherein the cancer index value is the mean β-value for the CpGs denoted by [[CG]] in SEQ ID NO: 5075;
[1138] 151. CpGs whose cancer index value is determined are located within at least DMR 76 defined by SEQ ID NO: 5076, and wherein when the cancer index for the individual is about 0.042 or more the individual is classified as having CIN3 and/or cancer or as having a high risk of CIN3 and/or cancer development, and wherein the sensitivity of the assay is at least 79.00% and the specificity of the assay is at least 75.00%, preferably wherein the panel of one or more CpGs comprises at least four CpG from DMR 76, and more preferably wherein the cancer index value is the mean β-value for the CpGs denoted by [[CG]] in SEQ ID NO: 5076;
[1139] 152. CpGs whose cancer index value is determined are located within at least DMR 76 defined by SEQ ID NO: 5076, and wherein when the cancer index for the individual is less than about 0.042 the individual is classified as not having CIN3 and/or cancer or as having a low risk of CIN3 and/or cancer development, and wherein the sensitivity of the assay is at least 79.00% and the specificity of the assay is at least 75.00%, preferably wherein the panel of one or more CpGs comprises at least four CpG from DMR 76, and more preferably wherein the cancer index value is the mean β-value for the CpGs denoted by [[CG]] in SEQ ID NO: 5076;
[1140] 153. CpGs whose cancer index value is determined are located within at least DMR 77 defined by SEQ ID NO: 5077, and wherein when the cancer index for the individual is about 0.038 or more the individual is classified as having CIN3 and/or cancer or as having a high risk of CIN3 and/or cancer development, and wherein the sensitivity of the assay is at least 77.00% and the specificity of the assay is at least 75.00%, preferably wherein the panel of one or more CpGs comprises at least five CpG from DMR 77, and more preferably wherein the cancer index value is the mean β-value for the CpGs denoted by [[CG]] in SEQ ID NO: 5077;
[1141] 154. CpGs whose cancer index value is determined are located within at least DMR 77 defined by SEQ ID NO: 5077, and wherein when the cancer index for the individual is less than about 0.038 the individual is classified as not having CIN3 and/or cancer or as having a low risk of CIN3 and/or cancer development, and wherein the sensitivity of the assay is at least 77.00% and the specificity of the assay is at least 75.00%, preferably wherein the panel of one or more CpGs comprises at least five CpG from DMR 77, and more preferably wherein the cancer index value is the mean β-value for the CpGs denoted by [[CG]] in SEQ ID NO: 5077;
[1142] 155. CpGs whose cancer index value is determined are located within at least DMR 78 defined by SEQ ID NO: 5078, and wherein when the cancer index for the individual is about 0.016 or more the individual is classified as having CIN3 and/or cancer or as having a high risk of CIN3 and/or cancer development, and wherein the sensitivity of the assay is at least 77.00% and the specificity of the assay is at least 75.00%, preferably wherein the panel of one or more CpGs comprises at least one CpG from DMR 78, and more preferably wherein the cancer index value is the mean β-value for the CpGs denoted by [[CG]] in SEQ ID NO: 5078;
[1143] 156. CpGs whose cancer index value is determined are located within at least DMR 78 defined by SEQ ID NO: 5078, and wherein when the cancer index for the individual is less than about 0.016 the individual is classified as not having CIN3 and/or cancer or as having a low risk of CIN3 and/or cancer development, and wherein the sensitivity of the assay is at least 77.00% and the specificity of the assay is at least 75.00%, preferably wherein the panel of one or more CpGs comprises at least one CpG from DMR 78, and more preferably wherein the cancer index value is the mean β-value for the CpGs denoted by [[CG]] in SEQ ID NO: 5078;
[1144] 157. CpGs whose cancer index value is determined are located within at least DMR 79 defined by SEQ ID NO: 5079, and wherein when the cancer index for the individual is about 0.033 or more the individual is classified as having CIN3 and/or cancer or as having a high risk of CIN3 and/or cancer development, and wherein the sensitivity of the assay is at least 77.00% and the specificity of the assay is at least 75.00%, preferably wherein the panel of one or more CpGs comprises at least eight CpG from DMR 79, and more preferably wherein the cancer index value is the mean β-value for the CpGs denoted by [[CG]] in SEQ ID NO: 5079;
[1145] 158. CpGs whose cancer index value is determined are located within at least DMR 79 defined by SEQ ID NO: 5079, and wherein when the cancer index for the individual is less than about 0.033 the individual is classified as not having CIN3 and/or cancer or as having a low risk of CIN3 and/or cancer development, and wherein the sensitivity of the assay is at least 77.00% and the specificity of the assay is at least 75.00%, preferably wherein the panel of one or more CpGs comprises at least eight CpG from DMR 79, and more preferably wherein the cancer index value is the mean β-value for the CpGs denoted by [[CG]] in SEQ ID NO: 5079;
[1146] 159. CpGs whose cancer index value is determined are located within at least DMR 80 defined by SEQ ID NO: 5080, and wherein when the cancer index for the individual is about 0.032 or more the individual is classified as having CIN3 and/or cancer or as having a high risk of CIN3 and/or cancer development, and wherein the sensitivity of the assay is at least 77.00% and the specificity of the assay is at least 75.00%, preferably wherein the panel of one or more CpGs comprises at least ten CpG from DMR 80, and more preferably wherein the cancer index value is the mean β-value for the CpGs denoted by [[CG]] in SEQ ID NO: 5080;
[1147] 160. CpGs whose cancer index value is determined are located within at least DMR 80 defined by SEQ ID NO: 5080, and wherein when the cancer index for the individual is less than about 0.032 the individual is classified as not having CIN3 and/or cancer or as having a low risk of CIN3 and/or cancer development, and wherein the sensitivity of the assay is at least 77.00% and the specificity of the assay is at least 75.00%, preferably wherein the panel of one or more CpGs comprises at least ten CpG from DMR 80, and more preferably wherein the cancer index value is the mean β-value for the CpGs denoted by [[CG]] in SEQ ID NO: 5080;
[1148] 161. CpGs whose cancer index value is determined are located within at least DMR 81 defined by SEQ ID NO: 5081, and wherein when the cancer index for the individual is about 0.037 or more the individual is classified as having CIN3 and/or cancer or as having a high risk of CIN3 and/or cancer development, and wherein the sensitivity of the assay is at least 75.00% and the specificity of the assay is at least 75.00%, preferably wherein the panel of one or more CpGs comprises at least four CpG from DMR 81, and more preferably wherein the cancer index value is the mean β-value for the CpGs denoted by [[CG]] in SEQ ID NO: 5081;
[1149] 162. CpGs whose cancer index value is determined are located within at least DMR 81 defined by SEQ ID NO: 5081, and wherein when the cancer index for the individual is less than about 0.037 the individual is classified as not having CIN3 and/or cancer or as having a low risk of CIN3 and/or cancer development, and wherein the sensitivity of the assay is at least 75.00% and the specificity of the assay is at least 75.00%, preferably wherein the panel of one or more CpGs comprises at least four CpG from DMR 81, and more preferably wherein the cancer index value is the mean β-value for the CpGs denoted by [[CG]] in SEQ ID NO: 5081;
[1150] 163. CpGs whose cancer index value is determined are located within at least DMR 82 defined by SEQ ID NO: 5082, and wherein when the cancer index for the individual is about 0.033 or more the individual is classified as having CIN3 and/or cancer or as having a high risk of CIN3 and/or cancer development, and wherein the sensitivity of the assay is at least 75.00% and the specificity of the assay is at least 75.00%, preferably wherein the panel of one or more CpGs comprises at least ten CpG from DMR 82, and more preferably wherein the cancer index value is the mean β-value for the CpGs denoted by [[CG]] in SEQ ID NO: 5082;
[1151] 164. CpGs whose cancer index value is determined are located within at least DMR 82 defined by SEQ ID NO: 5082, and wherein when the cancer index for the individual is less than about 0.033 the individual is classified as not having CIN3 and/or cancer or as having a low risk of CIN3 and/or cancer development, and wherein the sensitivity of the assay is at least 75.00% and the specificity of the assay is at least 75.00%, preferably wherein the panel of one or more CpGs comprises at least ten CpG from DMR 82, and more preferably wherein the cancer index value is the mean β-value for the CpGs denoted by [[CG]] in SEQ ID NO: 5082;
[1152] 165. CpGs whose cancer index value is determined are located within at least DMR 83 defined by SEQ ID NO: 5083, and wherein when the cancer index for the individual is about 0.042 or more the individual is classified as having CIN3 and/or cancer or as having a high risk of CIN3 and/or cancer development, and wherein the sensitivity of the assay is at least 71.00% and the specificity of the assay is at least 75.00%, preferably wherein the panel of one or more CpGs comprises at least eight CpG from DMR 83, and more preferably wherein the cancer index value is the mean β-value for the CpGs denoted by [[CG]] in SEQ ID NO: 5083;
[1153] 166. CpGs whose cancer index value is determined are located within at least DMR 83 defined by SEQ ID NO: 5083, and wherein when the cancer index for the individual is less than about 0.042 the individual is classified as not having CIN3 and/or cancer or as having a low risk of CIN3 and/or cancer development, and wherein the sensitivity of the assay is at least 71.00% and the specificity of the assay is at least 75.00%, preferably wherein the panel of one or more CpGs comprises at least eight CpG from DMR 83, and more preferably wherein the cancer index value is the mean β-value for the CpGs denoted by [[CG]] in SEQ ID NO: 5083;
[1154] 167. CpGs whose cancer index value is determined are located within at least DMR 84 defined by SEQ ID NO: 5084, and wherein when the cancer index for the individual is about 0.033 or more the individual is classified as having CIN3 and/or cancer or as having a high risk of CIN3 and/or cancer development, and wherein the sensitivity of the assay is at least 75.00% and the specificity of the assay is at least 75.00%, preferably wherein the panel of one or more CpGs comprises at least ten CpG from DMR 84, and more preferably wherein the cancer index value is the mean β-value for the CpGs denoted by [[CG]] in SEQ ID NO: 5084;
[1155] 168. CpGs whose cancer index value is determined are located within at least DMR 84 defined by SEQ ID NO: 5084, and wherein when the cancer index for the individual is less than about 0.033 the individual is classified as not having CIN3 and/or cancer or as having a low risk of CIN3 and/or cancer development, and wherein the sensitivity of the assay is at least 75.00% and the specificity of the assay is at least 75.00%, DMR 84, and more preferably wherein the cancer index value is the mean β-value for the CpGs denoted by [[CG]] in SEQ ID NO: 5084;
[1156] 169. CpGs whose cancer index value is determined are located within at least DMR 85 defined by SEQ ID NO: 5085, and wherein when the cancer index for the individual is about 0.033 or more the individual is classified as having CIN3 and/or cancer or as having a high risk of CIN3 and/or cancer development, and wherein the sensitivity of the assay is at least 75.00% and the specificity of the assay is at least 75.00%, preferably wherein the panel of one or more CpGs comprises at least ten CpG from DMR 85, and more preferably wherein the cancer index value is the mean β-value for the CpGs denoted by [[CG]] in SEQ ID NO: 5085;
[1157] 170. CpGs whose cancer index value is determined are located within at least DMR 85 defined by SEQ ID NO: 5085, and wherein when the cancer index for the individual is less than about 0.033 the individual is classified as not having CIN3 and/or cancer or as having a low risk of CIN3 and/or cancer development, and wherein the sensitivity of the assay is at least 75.00% and the specificity of the assay is at least 75.00%, preferably wherein the panel of one or more CpGs comprises at least ten CpG from DMR 85, and more preferably wherein the cancer index value is the mean β-value for the CpGs denoted by [[CG]] in SEQ ID NO: 5085;
[1158] 171. CpGs whose cancer index value is determined are located within at least DMR 86 defined by SEQ ID NO: 5086, and wherein when the cancer index for the individual is about 0.033 or more the individual is classified as having CIN3 and/or cancer or as having a high risk of CIN3 and/or cancer development, and wherein the sensitivity of the assay is at least 75.00% and the specificity of the assay is at least 75.00%, preferably wherein the panel of one or more CpGs comprises at least ten CpG from DMR 86, and more preferably wherein the cancer index value is the mean β-value for the CpGs denoted by [[CG]] in SEQ ID NO: 5086;
[1159] 172. CpGs whose cancer index value is determined are located within at least DMR 86 defined by SEQ ID NO: 5086, and wherein when the cancer index for the individual is less than about 0.033 the individual is classified as not having CIN3 and/or cancer or as having a low risk of CIN3 and/or cancer development, and wherein the sensitivity of the assay is at least 75.00% and the specificity of the assay is at least 75.00%, preferably wherein the panel of one or more CpGs comprises at least ten CpG from DMR 86, and more preferably wherein the cancer index value is the mean β-value for the CpGs denoted by [[CG]] in SEQ ID NO: 5086;
[1160] 173. CpGs whose cancer index value is determined are located within at least DMR 87 defined by SEQ ID NO: 5087, and wherein when the cancer index for the individual is about 0.058 or more the individual is classified as having CIN3 and/or cancer or as having a high risk of CIN3 and/or cancer development, and wherein the sensitivity of the assay is at least 78.00% and the specificity of the assay is at least 75.00%, preferably wherein the panel of one or more CpGs comprises at least four CpG from DMR 87, and more preferably wherein the cancer index value is the mean β-value for the CpGs denoted by [[CG]] in SEQ ID NO: 5087;
[1161] 174. CpGs whose cancer index value is determined are located within at least DMR 87 defined by SEQ ID NO: 5087, and wherein when the cancer index for the individual is less than about 0.058 the individual is classified as not having CIN3 and/or cancer or as having a low risk of CIN3 and/or cancer development, and wherein the sensitivity of the assay is at least 78.00% and the specificity of the assay is at least 75.00%, preferably wherein the panel of one or more CpGs comprises at least four CpG from DMR 87, and more preferably wherein the cancer index value is the mean β-value for the CpGs denoted by [[CG]] in SEQ ID NO: 5087;
[1162] 175. CpGs whose cancer index value is determined are located within at least DMR 88 defined by SEQ ID NO: 5088, and wherein when the cancer index for the individual is about 0.042 or more the individual is classified as having CIN3 and/or cancer or as having a high risk of CIN3 and/or cancer development, and wherein the sensitivity of the assay is at least 74.00% and the specificity of the assay is at least 75.00%, preferably wherein the panel of one or more CpGs comprises at least twelve CpG from DMR 88, and more preferably wherein the cancer index value is the mean β-value for the CpGs denoted by [[CG]] in SEQ ID NO: 5088;
[1163] 176. CpGs whose cancer index value is determined are located within at least DMR 88 defined by SEQ ID NO: 5088, and wherein when the cancer index for the individual is less than about 0.042 the individual is classified as not having CIN3 and/or cancer or as having a low risk of CIN3 and/or cancer development, and wherein the sensitivity of the assay is at least 74.00% and the specificity of the assay is at least 75.00%, preferably wherein the panel of one or more CpGs comprises at least twelve CpG from DMR 88, and more preferably wherein the cancer index value is the mean β-value for the CpGs denoted by [[CG]] in SEQ ID NO: 5088;
[1164] 177. CpGs whose cancer index value is determined are located within at least DMR 89 defined by SEQ ID NO: 5089, and wherein when the cancer index for the individual is about 0.036 or more the individual is classified as having CIN3 and/or cancer or as having a high risk of CIN3 and/or cancer development, and wherein the sensitivity of the assay is at least 77.00% and the specificity of the assay is at least 75.00%, preferably wherein the panel of one or more CpGs comprises at least five CpG from DMR 89, and more preferably wherein the cancer index value is the mean β-value for the CpGs denoted by [[CG]] in SEQ ID NO: 5089;
[1165] 178. CpGs whose cancer index value is determined are located within at least DMR 89 defined by SEQ ID NO: 5089, and wherein when the cancer index for the individual is less than about 0.036 the individual is classified as not having CIN3 and/or cancer or as having a low risk of CIN3 and/or cancer development, and wherein the sensitivity of the assay is at least 77.00% and the specificity of the assay is at least 75.00%, preferably wherein the panel of one or more CpGs comprises at least five CpG from DMR 89, and more preferably wherein the cancer index value is the mean β-value for the CpGs denoted by [[CG]] in SEQ ID NO: 5089;
[1166] 179. CpGs whose cancer index value is determined are located within at least DMR 90 defined by SEQ ID NO: 5090, and wherein when the cancer index for the individual is about 0.04 or more the individual is classified as having CIN3 and/or cancer or as having a high risk of CIN3 and/or cancer development, and wherein the sensitivity of the assay is at least 70.00% and the specificity of the assay is at least 75.00%, preferably wherein the panel of one or more CpGs comprises at least eight CpG from DMR 90, and more preferably wherein the cancer index value is the mean β-value for the CpGs denoted by [[CG]] in SEQ ID NO: 5090;
[1167] 180. CpGs whose cancer index value is determined are located within at least DMR 90 defined by SEQ ID NO: 5090, and wherein when the cancer index for the individual is less than about 0.04 the individual is classified as not having CIN3 and/or cancer or as having a low risk of CIN3 and/or cancer development, and wherein the sensitivity of the assay is at least 70.00% and the specificity of the assay is at least 75.00%, preferably wherein the panel of one or more CpGs comprises at least eight CpG from DMR 90, and more preferably wherein the cancer index value is the mean β-value for the CpGs denoted by [[CG]] in SEQ ID NO: 5090;
[1168] 181. CpGs whose cancer index value is determined are located within at least DMR 91 defined by SEQ ID NO: 5091, and wherein when the cancer index for the individual is about 0.04 or more the individual is classified as having CIN3 and/or cancer or as having a high risk of CIN3 and/or cancer development, and wherein the sensitivity of the assay is at least 70.00% and the specificity of the assay is at least 75.00%, preferably wherein the panel of one or more CpGs comprises at least eight CpG from DMR 91, and more preferably wherein the cancer index value is the mean β-value for the CpGs denoted by [[CG]] in SEQ ID NO: 5091;
[1169] 182. CpGs whose cancer index value is determined are located within at least DMR 91 defined by SEQ ID NO: 5091, and wherein when the cancer index for the individual is less than about 0.04 the individual is classified as not having CIN3 and/or cancer or as having a low risk of CIN3 and/or cancer development, and wherein the sensitivity of the assay is at least 70.00% and the specificity of the assay is at least 75.00%, preferably wherein the panel of one or more CpGs comprises at least eight CpG from DMR 91, and more preferably wherein the cancer index value is the mean β-value for the CpGs denoted by [[CG]] in SEQ ID NO: 5091;
[1170] 183. CpGs whose cancer index value is determined are located within at least DMR 92 defined by SEQ ID NO: 5092, and wherein when the cancer index for the individual is about 0.042 or more the individual is classified as having CIN3 and/or cancer or as having a high risk of CIN3 and/or cancer development, and wherein the sensitivity of the assay is at least 70.00% and the specificity of the assay is at least 75.00%, preferably wherein the panel of one or more CpGs comprises at least seven CpG from DMR 92, and more preferably wherein the cancer index value is the mean β-value for the CpGs denoted by [[CG]] in SEQ ID NO: 5092;
[1171] 184. CpGs whose cancer index value is determined are located within at least DMR 92 defined by SEQ ID NO: 5092, and wherein when the cancer index for the individual is less than about 0.042 the individual is classified as not having CIN3 and/or cancer or as having a low risk of CIN3 and/or cancer development, and wherein the sensitivity of the assay is at least 70.00% and the specificity of the assay is at least 75.00%, preferably wherein the panel of one or more CpGs comprises at least seven CpG from DMR 92, and more preferably wherein the cancer index value is the mean β-value for the CpGs denoted by [[CG]] in SEQ ID NO: 5092;
[1172] 185. CpGs whose cancer index value is determined are located within at least DMR 93 defined by SEQ ID NO: 5093, and wherein when the cancer index for the individual is about 0.05 or more the individual is classified as having CIN3 and/or cancer or as having a high risk of CIN3 and/or cancer development, and wherein the sensitivity of the assay is at least 79.00% and the specificity of the assay is at least 75.00%, preferably wherein the panel of one or more CpGs comprises at least six CpG from DMR 93, and more preferably wherein the cancer index value is the mean β-value for the CpGs denoted by [[CG]] in SEQ ID NO: 5093;
[1173] 186. CpGs whose cancer index value is determined are located within at least DMR 93 defined by SEQ ID NO: 5093, and wherein when the cancer index for the individual is less than about 0.05 the individual is classified as not having CIN3 and/or cancer or as having a low risk of CIN3 and/or cancer development, and wherein the sensitivity of the assay is at least 79.00% and the specificity of the assay is at least 75.00%, preferably wherein the panel of one or more CpGs comprises at least six CpG from DMR 93, and more preferably wherein the cancer index value is the mean β-value for the CpGs denoted by [[CG]] in SEQ ID NO: 5093;
[1174] 187. CpGs whose cancer index value is determined are located within at least DMR 94 defined by SEQ ID NO: 5094, and wherein when the cancer index for the individual is about 0.05 or more the individual is classified as having CIN3 and/or cancer or as having a high risk of CIN3 and/or cancer development, and wherein the sensitivity of the assay is at least 79.00% and the specificity of the assay is at least 75.00%, preferably wherein the panel of one or more CpGs comprises at least six CpG from DMR 94, and more preferably wherein the cancer index value is the mean β-value for the CpGs denoted by [[CG]] in SEQ ID NO: 5094;
[1175] 188. CpGs whose cancer index value is determined are located within at least DMR 94 defined by SEQ ID NO: 5094, and wherein when the cancer index for the individual is less than about 0.05 the individual is classified as not having CIN3 and/or cancer or as having a low risk of CIN3 and/or cancer development, and wherein the sensitivity of the assay is at least 79.00% and the specificity of the assay is at least 75.00%, preferably wherein the panel of one or more CpGs comprises at least six CpG from DMR 94, and more preferably wherein the cancer index value is the mean β-value for the CpGs denoted by [[CG]] in SEQ ID NO: 5094;
[1176] 189. CpGs whose cancer index value is determined are located within at least DMR 95 defined by SEQ ID NO: 5095, and wherein when the cancer index for the individual is about 0.032 or more the individual is classified as having CIN3 and/or cancer or as having a high risk of CIN3 and/or cancer development, and wherein the sensitivity of the assay is at least 77.00% and the specificity of the assay is at least 75.00%, preferably wherein the panel of one or more CpGs comprises at least four CpG from DMR 95, and more preferably wherein the cancer index value is the mean β-value for the CpGs denoted by [[CG]] in SEQ ID NO: 5095;
[1177] 190. CpGs whose cancer index value is determined are located within at least DMR 95 defined by SEQ ID NO: 5095, and wherein when the cancer index for the individual is less than about 0.032 the individual is classified as not having CIN3 and/or cancer or as having a low risk of CIN3 and/or cancer development, and wherein the sensitivity of the assay is at least 77.00% and the specificity of the assay is at least 75.00%, preferably wherein the panel of one or more CpGs comprises at least four CpG from DMR 95, and more preferably wherein the cancer index value is the mean β-value for the CpGs denoted by [[CG]] in SEQ ID NO: 5095;
[1178] 191. CpGs whose cancer index value is determined are located within at least DMR 96 defined by SEQ ID NO: 5096, and wherein when the cancer index for the individual is about 0.032 or more the individual is classified as having CIN3 and/or cancer or as having a high risk of CIN3 and/or cancer development, and wherein the sensitivity of the assay is at least 77.00% and the specificity of the assay is at least 75.00%, DMR 96, and more preferably wherein the cancer index value is the mean β-value for the CpGs denoted by [[CG]] in SEQ ID NO: 5096;
[1179] 192. CpGs whose cancer index value is determined are located within at least DMR 96 defined by SEQ ID NO: 5096, and wherein when the cancer index for the individual is less than about 0.032 the individual is classified as not having CIN3 and/or cancer or as having a low risk of CIN3 and/or cancer development, and wherein the sensitivity of the assay is at least 77.00% and the specificity of the assay is at least 75.00%, preferably wherein the panel of one or more CpGs comprises at least four CpG from DMR 96, and more preferably wherein the cancer index value is the mean β-value for the CpGs denoted by [[CG]] in SEQ ID NO: 5096;
[1180] 193. CpGs whose cancer index value is determined are located within at least DMR 97 defined by SEQ ID NO: 5097, and wherein when the cancer index for the individual is about 0.053 or more the individual is classified as having CIN3 and/or cancer or as having a high risk of CIN3 and/or cancer development, and wherein the sensitivity of the assay is at least 77.00% and the specificity of the assay is at least 75.00%, preferably wherein the panel of one or more CpGs comprises at least seven CpG from DMR 97, and more preferably wherein the cancer index value is the mean β-value for the CpGs denoted by [[CG]] in SEQ ID NO: 5097;
[1181] 194. CpGs whose cancer index value is determined are located within at least DMR 97 defined by SEQ ID NO: 5097, and wherein when the cancer index for the individual is less than about 0.053 the individual is classified as not having CIN3 and/or cancer or as having a low risk of CIN3 and/or cancer development, and wherein the sensitivity of the assay is at least 77.00% and the specificity of the assay is at least 75.00%, preferably wherein the panel of one or more CpGs comprises at least seven CpG from DMR 97, and more preferably wherein the cancer index value is the mean β-value for the CpGs denoted by [[CG]] in SEQ ID NO: 5097;
[1182] 195. CpGs whose cancer index value is determined are located within at least DMR 98 defined by SEQ ID NO: 5098, and wherein when the cancer index for the individual is about 0.024 or more the individual is classified as having CIN3 and/or cancer or as having a high risk of CIN3 and/or cancer development, and wherein the sensitivity of the assay is at least 75.00% and the specificity of the assay is at least 75.00%, preferably wherein the panel of one or more CpGs comprises at least four CpG from DMR 98, and more preferably wherein the cancer index value is the mean β-value for the CpGs denoted by [[CG]] in SEQ ID NO: 5098;
[1183] 196. CpGs whose cancer index value is determined are located within at least DMR 98 defined by SEQ ID NO: 5098, and wherein when the cancer index for the individual is less than about 0.024 the individual is classified as not having CIN3 and/or cancer or as having a low risk of CIN3 and/or cancer development, and wherein the sensitivity of the assay is at least 75.00% and the specificity of the assay is at least 75.00%, preferably wherein the panel of one or more CpGs comprises at least four CpG from DMR 98, and more preferably wherein the cancer index value is the mean β-value for the CpGs denoted by [[CG]] in SEQ ID NO: 5098;
[1184] 197. CpGs whose cancer index value is determined are located within at least DMR 99 defined by SEQ ID NO: 5099, and wherein when the cancer index for the individual is about 0.032 or more the individual is classified as having CIN3 and/or cancer or as having a high risk of CIN3 and/or cancer development, and wherein the sensitivity of the assay is at least 77.00% and the specificity of the assay is at least 75.00%, preferably wherein the panel of one or more CpGs comprises at least four CpG from DMR 99, and more preferably wherein the cancer index value is the mean β-value for the CpGs denoted by [[CG]] in SEQ ID NO: 5099;
[1185] 198. CpGs whose cancer index value is determined are located within at least DMR 99 defined by SEQ ID NO: 5099, and wherein when the cancer index for the individual is less than about 0.032 the individual is classified as not having CIN3 and/or cancer or as having a low risk of CIN3 and/or cancer development, and wherein the sensitivity of the assay is at least 77.00% and the specificity of the assay is at least 75.00%, preferably wherein the panel of one or more CpGs comprises at least four CpG from DMR 99, and more preferably wherein the cancer index value is the mean β-value for the CpGs denoted by [[CG]] in SEQ ID NO: 5099;
[1186] 199. CpGs whose cancer index value is determined are located within at least DMR 100 defined by SEQ ID NO: 5100, and wherein when the cancer index for the individual is about 0.036 or more the individual is classified as having CIN3 and/or cancer or as having a high risk of CIN3 and/or cancer development, and wherein the sensitivity of the assay is at least 72.00% and the specificity of the assay is at least 75.00%, preferably wherein the panel of one or more CpGs comprises at least seven CpG from DMR 100, and more preferably wherein the cancer index value is the mean β-value for the CpGs denoted by [[CG]] in SEQ ID NO: 5100;
[1187] 200. CpGs whose cancer index value is determined are located within at least DMR 100 defined by SEQ ID NO: 5100, and wherein when the cancer index for the individual is less than about 0.036 the individual is classified as not having CIN3 and/or cancer or as having a low risk of CIN3 and/or cancer development, and wherein the sensitivity of the assay is at least 72.00% and the specificity of the assay is at least 75.00%, preferably wherein the panel of one or more CpGs comprises at least seven CpG from DMR 100, and more preferably wherein the cancer index value is the mean β-value for the CpGs denoted by [[CG]] in SEQ ID NO: 5100;
[1188] 201. CpGs whose cancer index value is determined are located within at least DMR 101 defined by SEQ ID NO: 5101, and wherein when the cancer index for the individual is about 0.034 or more the individual is classified as having CIN3 and/or cancer or as having a high risk of CIN3 and/or cancer development, and wherein the sensitivity of the assay is at least 76.00% and the specificity of the assay is at least 75.00%, preferably wherein the panel of one or more CpGs comprises at least nine CpG from DMR 101, and more preferably wherein the cancer index value is the mean β-value for the CpGs denoted by [[CG]] in SEQ ID NO: 5101;
[1189] 202. CpGs whose cancer index value is determined are located within at least DMR 101 defined by SEQ ID NO: 5101, and wherein when the cancer index for the individual is less than about 0.034 the individual is classified as not having CIN3 and/or cancer or as having a low risk of CIN3 and/or cancer development, and wherein the sensitivity of the assay is at least 76.00% and the specificity of the assay is at least 75.00%, preferably wherein the panel of one or more CpGs comprises at least nine CpG from DMR 101, and more preferably wherein the cancer index value is the mean β-value for the CpGs denoted by [[CG]] in SEQ ID NO: 5101;
[1190] 203. CpGs whose cancer index value is determined are located within at least DMR 102 defined by SEQ ID NO: 5102, and wherein when the cancer index for the individual is about 0.032 or more the individual is classified as having CIN3 and/or cancer or as having a high risk of CIN3 and/or cancer development, and wherein the sensitivity of the assay is at least 77.00% and the specificity of the assay is at least 75.00%, preferably wherein the panel of one or more CpGs comprises at least four CpG from DMR 102, and more preferably wherein the cancer index value is the mean β-value for the CpGs denoted by [[CG]] in SEQ ID NO: 5102;
[1191] 204. CpGs whose cancer index value is determined are located within at least DMR 102 defined by SEQ ID NO: 5102, and wherein when the cancer index for the individual is less than about 0.032 the individual is classified as not having CIN3 and/or cancer or as having a low risk of CIN3 and/or cancer development, and wherein the sensitivity of the assay is at least 77.00% and the specificity of the assay is at least 75.00%, preferably wherein the panel of one or more CpGs comprises at least four CpG from DMR 102, and more preferably wherein the cancer index value is the mean β-value for the CpGs denoted by [[CG]] in SEQ ID NO: 5102;
[1192] 205. CpGs whose cancer index value is determined are located within at least DMR 103 defined by SEQ ID NO: 5103, and wherein when the cancer index for the individual is about 0.034 or more the individual is classified as having CIN3 and/or cancer or as having a high risk of CIN3 and/or cancer development, and wherein the sensitivity of preferably wherein the panel of one or more CpGs comprises at least nine CpG from DMR 103, and more preferably wherein the cancer index value is the mean β-value for the CpGs denoted by [[CG]] in SEQ ID NO: 5103;
[1193] 206. CpGs whose cancer index value is determined are located within at least DMR 103 defined by SEQ ID NO: 5103, and wherein when the cancer index for the individual is less than about 0.034 the individual is classified as not having CIN3 and/or cancer or as having a low risk of CIN3 and/or cancer development, and wherein the sensitivity of the assay is at least 76.00% and the specificity of the assay is at least 75.00%, preferably wherein the panel of one or more CpGs comprises at least nine CpG from DMR 103, and more preferably wherein the cancer index value is the mean β-value for the CpGs denoted by [[CG]] in SEQ ID NO: 5103;
[1194] 207. CpGs whose cancer index value is determined are located within at least DMR 104 defined by SEQ ID NO: 5104, and wherein when the cancer index for the individual is about 0.024 or more the individual is classified as having CIN3 and/or cancer or as having a high risk of CIN3 and/or cancer development, and wherein the sensitivity of the assay is at least 75.00% and the specificity of the assay is at least 75.00%, preferably wherein the panel of one or more CpGs comprises at least four CpG from DMR 104, and more preferably wherein the cancer index value is the mean β-value for the CpGs denoted by [[CG]] in SEQ ID NO: 5104;
[1195] 208. CpGs whose cancer index value is determined are located within at least DMR 104 defined by SEQ ID NO: 5104, and wherein when the cancer index for the individual is less than about 0.024 the individual is classified as not having CIN3 and/or cancer or as having a low risk of CIN3 and/or cancer development, and wherein the sensitivity of the assay is at least 75.00% and the specificity of the assay is at least 75.00%, preferably wherein the panel of one or more CpGs comprises at least four CpG from DMR 104, and more preferably wherein the cancer index value is the mean β-value for the CpGs denoted by [[CG]] in SEQ ID NO: 5104;
[1196] 209. CpGs whose cancer index value is determined are located within at least DMR 105 defined by SEQ ID NO: 5105, and wherein when the cancer index for the individual is about 0.024 or more the individual is classified as having CIN3 and/or cancer or as having a high risk of CIN3 and/or cancer development, and wherein the sensitivity of the assay is at least 75.00% and the specificity of the assay is at least 75.00%, preferably wherein the panel of one or more CpGs comprises at least four CpG from DMR 105, and more preferably wherein the cancer index value is the mean β-value for the CpGs denoted by [[CG]] in SEQ ID NO: 5105;
[1197] 210. CpGs whose cancer index value is determined are located within at least DMR 105 defined by SEQ ID NO: 5105, and wherein when the cancer index for the individual is less than about 0.024 the individual is classified as not having CIN3 and/or cancer or as having a low risk of CIN3 and/or cancer development, and wherein the sensitivity of the assay is at least 75.00% and the specificity of the assay is at least 75.00%, preferably wherein the panel of one or more CpGs comprises at least four CpG from DMR 105, and more preferably wherein the cancer index value is the mean β-value for the CpGs denoted by [[CG]] in SEQ ID NO: 5105;
[1198] 211. CpGs whose cancer index value is determined are located within at least DMR 106 defined by SEQ ID NO: 5106, and wherein when the cancer index for the individual is about 0.036 or more the individual is classified as having CIN3 and/or cancer or as having a high risk of CIN3 and/or cancer development, and wherein the sensitivity of the assay is at least 72.00% and the specificity of the assay is at least 75.00%, preferably wherein the panel of one or more CpGs comprises at least seven CpG from DMR 106, and more preferably wherein the cancer index value is the mean β-value for the CpGs denoted by [[CG]] in SEQ ID NO: 5106;
[1199] 212. CpGs whose cancer index value is determined are located within at least DMR 106 defined by SEQ ID NO: 5106, and wherein when the cancer index for the individual is less than about 0.036 the individual is classified as not having CIN3 and/or cancer or as having a low risk of CIN3 and/or cancer development, and wherein the sensitivity of the assay is at least 72.00% and the specificity of the assay is at least 75.00%, preferably wherein the panel of one or more CpGs comprises at least seven CpG from DMR 106, and more preferably wherein the cancer index value is the mean β-value for the CpGs denoted by [[CG]] in SEQ ID NO: 5106;
[1200] 213. CpGs whose cancer index value is determined are located within at least DMR 107 defined by SEQ ID NO: 5107, and wherein when the cancer index for the individual is about 0.036 or more the individual is classified as having CIN3 and/or cancer or as having a high risk of CIN3 and/or cancer development, and wherein the sensitivity of the assay is at least 72.00% and the specificity of the assay is at least 75.00%, preferably wherein the panel of one or more CpGs comprises at least seven CpG from DMR 107, and more preferably wherein the cancer index value is the mean β-value for the CpGs denoted by [[CG]] in SEQ ID NO: 5107;
[1201] 214. CpGs whose cancer index value is determined are located within at least DMR 107 defined by SEQ ID NO: 5107, and wherein when the cancer index for the individual is less than about 0.036 the individual is classified as not having CIN3 and/or cancer or as having a low risk of CIN3 and/or cancer development, and wherein the sensitivity of the assay is at least 72.00% and the specificity of the assay is at least 75.00%, preferably wherein the panel of one or more CpGs comprises at least seven CpG from DMR 107, and more preferably wherein the cancer index value is the mean β-value for the CpGs denoted by [[CG]] in SEQ ID NO: 5107;
[1202] 215. CpGs whose cancer index value is determined are located within at least DMR 108 defined by SEQ ID NO: 5108, and wherein when the cancer index for the individual is about 0.051 or more the individual is classified as having CIN3 and/or cancer or as having a high risk of CIN3 and/or cancer development, and wherein the sensitivity of the assay is at least 77.00% and the specificity of the assay is at least 75.00%, preferably wherein the panel of one or more CpGs comprises at least four CpG from DMR 108, and more preferably wherein the cancer index value is the mean β-value for the CpGs denoted by [[CG]] in SEQ ID NO: 5108;
[1203] 216. CpGs whose cancer index value is determined are located within at least DMR 108 defined by SEQ ID NO: 5108, and wherein when the cancer index for the individual is less than about 0.051 the individual is classified as not having CIN3 and/or cancer or as having a low risk of CIN3 and/or cancer development, and wherein the sensitivity of the assay is at least 77.00% and the specificity of the assay is at least 75.00%, preferably wherein the panel of one or more CpGs comprises at least four CpG from DMR 108, and more preferably wherein the cancer index value is the mean β-value for the CpGs denoted by [[CG]] in SEQ ID NO: 5108;
[1204] 217. CpGs whose cancer index value is determined are located within at least DMR 109 defined by SEQ ID NO: 5109, and wherein when the cancer index for the individual is about 0.04 or more the individual is classified as having CIN3 and/or cancer or as having a high risk of CIN3 and/or cancer development, and wherein the sensitivity of the assay is at least 76.00% and the specificity of the assay is at least 75.00%, preferably wherein the panel of one or more CpGs comprises at least four CpG from DMR 109, and more preferably wherein the cancer index value is the mean β-value for the CpGs denoted by [[CG]] in SEQ ID NO: 5109;
[1205] 218. CpGs whose cancer index value is determined are located within at least DMR 109 defined by SEQ ID NO: 5109, and wherein when the cancer index for the individual is less than about 0.04 the individual is classified as not having CIN3 and/or cancer or as having a low risk of CIN3 and/or cancer development, and wherein the sensitivity of the assay is at least 76.00% and the specificity of the assay is at least 75.00%, preferably wherein the panel of one or more CpGs comprises at least four CpG from DMR 109, and more preferably wherein the cancer index value is the mean β-value for the CpGs denoted by [[CG]] in SEQ ID NO: 5109;
[1206] 219. CpGs whose cancer index value is determined are located within at least DMR 110 defined by SEQ ID NO: 5110, and wherein when the cancer index for the individual is about 0.04 or more the individual is classified as having CIN3 and/or cancer or as having a high risk of CIN3 and/or cancer development, and wherein the sensitivity of the assay is at least 76.00% and the specificity of the assay is at least 75.00%, preferably wherein the panel of one or more CpGs comprises at least four CpG from DMR 110, and more preferably wherein the cancer index value is the mean β-value for the CpGs denoted by [[CG]] in SEQ ID NO: 5110;
[1207] 220. CpGs whose cancer index value is determined are located within at least DMR 110 defined by SEQ ID NO: 5110, and wherein when the cancer index for the individual is less than about 0.04 the individual is classified as not having CIN3 and/or cancer or as having a low risk of CIN3 and/or cancer development, and wherein the sensitivity of the assay is at least 76.00% and the specificity of the assay is at least 75.00%, preferably wherein the panel of one or more CpGs comprises at least four CpG from DMR 110, and more preferably wherein the cancer index value is the mean β-value for the CpGs denoted by [[CG]] in SEQ ID NO: 5110;
[1208] 221. CpGs whose cancer index value is determined are located within at least DMR 111 defined by SEQ ID NO: 5111, and wherein when the cancer index for the individual is about 0.057 or more the individual is classified as having CIN3 and/or cancer or as having a high risk of CIN3 and/or cancer development, and wherein the sensitivity of the assay is at least 77.00% and the specificity of the assay is at least 75.00%, preferably wherein the panel of one or more CpGs comprises at least five CpG from DMR 111, and more preferably wherein the cancer index value is the mean β-value for the CpGs denoted by [[CG]] in SEQ ID NO: 5111;
[1209] 222. CpGs whose cancer index value is determined are located within at least DMR 111 defined by SEQ ID NO: 5111, and wherein when the cancer index for the individual is less than about 0.057 the individual is classified as not having CIN3 and/or cancer or as having a low risk of CIN3 and/or cancer development, and wherein the sensitivity of the assay is at least 77.00% and the specificity of the assay is at least 75.00%, preferably wherein the panel of one or more CpGs comprises at least five CpG from DMR 111, and more preferably wherein the cancer index value is the mean β-value for the CpGs denoted by [[CG]] in SEQ ID NO: 5111;
[1210] 223. CpGs whose cancer index value is determined are located within at least DMR 112 defined by SEQ ID NO: 5112, and wherein when the cancer index for the individual is about 0.04 or more the individual is classified as having CIN3 and/or cancer or as having a high risk of CIN3 and/or cancer development, and wherein the sensitivity of the assay is at least 76.00% and the specificity of the assay is at least 75.00%, preferably wherein the panel of one or more CpGs comprises at least four CpG from DMR 112, and more preferably wherein the cancer index value is the mean β-value for the CpGs denoted by [[CG]] in SEQ ID NO: 5112;
[1211] 224. CpGs whose cancer index value is determined are located within at least DMR 112 defined by SEQ ID NO: 5112, and wherein when the cancer index for the individual is less than about 0.04 the individual is classified as not having CIN3 and/or cancer or as having a low risk of CIN3 and/or cancer development, and wherein the sensitivity of the assay is at least 76.00% and the specificity of the assay is at least 75.00%, preferably wherein the panel of one or more CpGs comprises at least four CpG from DMR 112, and more preferably wherein the cancer index value is the mean β-value for the CpGs denoted by [[CG]] in SEQ ID NO: 5112;
[1212] 225. CpGs whose cancer index value is determined are located within at least DMR 113 defined by SEQ ID NO: 5113, and wherein when the cancer index for the individual is about 0.057 or more the individual is classified as having CIN3 and/or cancer or as having a high risk of CIN3 and/or cancer development, and wherein the sensitivity of the assay is at least 77.00% and the specificity of the assay is at least 75.00%, preferably wherein the panel of one or more CpGs comprises at least five CpG from DMR 113, and more preferably wherein the cancer index value is the mean β-value for the CpGs denoted by [[CG]] in SEQ ID NO: 5113;
[1213] 226. CpGs whose cancer index value is determined are located within at least DMR 113 defined by SEQ ID NO: 5113, and wherein when the cancer index for the individual is less than about 0.057 the individual is classified as not having CIN3 and/or cancer or as having a low risk of CIN3 and/or cancer development, and wherein the sensitivity of the assay is at least 77.00% and the specificity of the assay is at least 75.00%, preferably wherein the panel of one or more CpGs comprises at least five CpG from DMR 113, and more preferably wherein the cancer index value is the mean β-value for the CpGs denoted by [[CG]] in SEQ ID NO: 5113;
[1214] 227. CpGs whose cancer index value is determined are located within at least DMR 114 defined by SEQ ID NO: 5114, and wherein when the cancer index for the individual is about 0.04 or more the individual is classified as having CIN3 and/or cancer or as having a high risk of CIN3 and/or cancer development, and wherein the sensitivity of the assay is at least 76.00% and the specificity of the assay is at least 75.00%, preferably wherein the panel of one or more CpGs comprises at least four CpG from DMR 114, and more preferably wherein the cancer index value is the mean β-value for the CpGs denoted by [[CG]] in SEQ ID NO: 5114;
[1215] 228. CpGs whose cancer index value is determined are located within at least DMR 114 defined by SEQ ID NO: 5114, and wherein when the cancer index for the individual is less than about 0.04 or more the individual is classified as having CIN3 and/or cancer or as having a high risk of CIN3 and/or cancer development, and wherein the sensitivity of the assay is at least 76.00% and the specificity of the assay is at least 75.00%, preferably wherein the panel of one or more CpGs comprises at least four CpG from DMR 114, and more preferably wherein the cancer index value is the mean β-value for the CpGs denoted by [[CG]] in SEQ ID NO: 5114;
[1216] 229. CpGs whose cancer index value is determined are located within at least DMR 115 defined by SEQ ID NO: 5115, and wherein when the cancer index for the individual is about 0.037 or more the individual is classified as having CIN3 and/or cancer or as having a high risk of CIN3 and/or cancer development, and wherein the sensitivity of the assay is at least 76.00% and the specificity of the assay is at least 75.00%, preferably wherein the panel of one or more CpGs comprises at least eight CpG from DMR 115, and more preferably wherein the cancer index value is the mean β-value for the CpGs denoted by [[CG]] in SEQ ID NO: 5115;
[1217] 230. CpGs whose cancer index value is determined are located within at least DMR 115 defined by SEQ ID NO: 5115, and wherein when the cancer index for the individual is less than about 0.037 the individual is classified as not having CIN3 and/or cancer or as having a low risk of CIN3 and/or cancer development, and wherein the sensitivity of the assay is at least 76.00% and the specificity of the assay is at least 75.00%, preferably wherein the panel of one or more CpGs comprises at least eight CpG from DMR 115, and more preferably wherein the cancer index value is the mean β-value for the CpGs denoted by [[CG]] in SEQ ID NO: 5115;
[1218] 231. CpGs whose cancer index value is determined are located within at least DMR 116 defined by SEQ ID NO: 5116, and wherein when the cancer index for the individual is about 0.047 or more the individual is classified as having CIN3 and/or cancer or as having a high risk of CIN3 and/or cancer development, and wherein the sensitivity of the assay is at least 76.00% and the specificity of the assay is at least 75.00%, preferably wherein the panel of one or more CpGs comprises at least one CpG from DMR 116, and more preferably wherein the cancer index value is the mean β-value for the CpGs denoted by [[CG]] in SEQ ID NO: 5116;
[1219] 232. CpGs whose cancer index value is determined are located within at least DMR 116 defined by SEQ ID NO: 5116, and wherein when the cancer index for the individual is less than about 0.047 the individual is classified as not having CIN3 and/or cancer or as having a low risk of CIN3 and/or cancer development, and wherein the sensitivity of the assay is at least 76.00% and the specificity of the assay is at least 75.00%, preferably wherein the panel of one or more CpGs comprises at least one CpG from DMR 116, and more preferably wherein the cancer index value is the mean β-value for the CpGs denoted by [[CG]] in SEQ ID NO: 5116;
[1220] 233. CpGs whose cancer index value is determined are located within at least DMR 117 defined by SEQ ID NO: 5117, and wherein when the cancer index for the individual is about 0.035 or more the individual is classified as having CIN3 and/or cancer or as having a high risk of CIN3 and/or cancer development, and wherein the sensitivity of the assay is at least 78.00% and the specificity of the assay is at least 75.00%, preferably wherein the panel of one or more CpGs comprises at least eight CpG from DMR 117, and more preferably wherein the cancer index value is the mean β-value for the CpGs denoted by [[CG]] in SEQ ID NO: 5117;
[1221] 234. CpGs whose cancer index value is determined are located within at least DMR 117 defined by SEQ ID NO: 5117, and wherein when the cancer index for the individual is less than about 0.035 the individual is classified as not having CIN3 and/or cancer or as having a low risk of CIN3 and/or cancer development, and wherein the sensitivity of the assay is at least 78.00% and the specificity of the assay is at least 75.00%, preferably wherein the panel of one or more CpGs comprises at least eight CpG from DMR 117, and more preferably wherein the cancer index value is the mean β-value for the CpGs denoted by [[CG]] in SEQ ID NO: 5117;
[1222] 235. CpGs whose cancer index value is determined are located within at least DMR 118 defined by SEQ ID NO: 5118, and wherein when the cancer index for the individual is about 0.043 or more the individual is classified as having CIN3 and/or cancer or as having a high risk of CIN3 and/or cancer development, and wherein the sensitivity of the assay is at least 74.00% and the specificity of the assay is at least 75.00%, preferably wherein the panel of one or more CpGs comprises at least ten CpG from DMR 118, and more preferably wherein the cancer index value is the mean β-value for the CpGs denoted by [[CG]] in SEQ ID NO: 5118;
[1223] 236. CpGs whose cancer index value is determined are located within at least DMR 118 defined by SEQ ID NO: 5118, and wherein when the cancer index for the individual is less than about 0.043 the individual is classified as not having CIN3 and/or cancer or as having a low risk of CIN3 and/or cancer development, and wherein the sensitivity of the assay is at least 74.00% and the specificity of the assay is at least 75.00%, preferably wherein the panel of one or more CpGs comprises at least ten CpG from DMR 118, and more preferably wherein the cancer index value is the mean β-value for the CpGs denoted by [[CG]] in SEQ ID NO: 5118;
[1224] 237. CpGs whose cancer index value is determined are located within at least DMR 119 defined by SEQ ID NO: 5119, and wherein when the cancer index for the individual is about 0.043 or more the individual is classified as having CIN3 and/or cancer or as having a high risk of CIN3 and/or cancer development, and wherein the sensitivity of the assay is at least 74.00% and the specificity of the assay is at least 75.00%, DMR 119, and more preferably wherein the cancer index value is the mean β-value for the CpGs denoted by [[CG]] in SEQ ID NO: 5119;
[1225] 238. CpGs whose cancer index value is determined are located within at least DMR 119 defined by SEQ ID NO: 5119, and wherein when the cancer index for the individual is less than about 0.043 the individual is classified as not having CIN3 and/or cancer or as having a low risk of CIN3 and/or cancer development, and wherein the sensitivity of the assay is at least 74.00% and the specificity of the assay is at least 75.00%, preferably wherein the panel of one or more CpGs comprises at least ten CpG from DMR 119, and more preferably wherein the cancer index value is the mean β-value for the CpGs denoted by [[CG]] in SEQ ID NO: 5119;
[1226] 239. CpGs whose cancer index value is determined are located within at least DMR 120 defined by SEQ ID NO: 5120, and wherein when the cancer index for the individual is about 0.043 or more the individual is classified as having CIN3 and/or cancer or as having a high risk of CIN3 and/or cancer development, and wherein the sensitivity of the assay is at least 74.00% and the specificity of the assay is at least 75.00%, preferably wherein the panel of one or more CpGs comprises at least ten CpG from DMR 120, and more preferably wherein the cancer index value is the mean β-value for the CpGs denoted by [[CG]] in SEQ ID NO: 5120;
[1227] 240. CpGs whose cancer index value is determined are located within at least DMR 120 defined by SEQ ID NO: 5120, and wherein when the cancer index for the individual is less than about 0.043 the individual is classified as not having CIN3 and/or cancer or as having a low risk of CIN3 and/or cancer development, and wherein the sensitivity of the assay is at least 74.00% and the specificity of the assay is at least 75.00%, preferably wherein the panel of one or more CpGs comprises at least ten CpG from DMR 120, and more preferably wherein the cancer index value is the mean β-value for the CpGs denoted by [[CG]] in SEQ ID NO: 5120;
[1228] 241. CpGs whose cancer index value is determined are located within at least DMR 121 defined by SEQ ID NO: 5121, and wherein when the cancer index for the individual is about 0.043 or more the individual is classified as having CIN3 and/or cancer or as having a high risk of CIN3 and/or cancer development, and wherein the sensitivity of the assay is at least 74.00% and the specificity of the assay is at least 75.00%, preferably wherein the panel of one or more CpGs comprises at least ten CpG from DMR 121, and more preferably wherein the cancer index value is the mean β-value for the CpGs denoted by [[CG]] in SEQ ID NO: 5121;
[1229] 242. CpGs whose cancer index value is determined are located within at least DMR 121 defined by SEQ ID NO: 5121, and wherein when the cancer index for the individual is less than about 0.043 the individual is classified as not having CIN3 and/or cancer or as having a low risk of CIN3 and/or cancer development, and wherein the sensitivity of the assay is at least 74.00% and the specificity of the assay is at least 75.00%, preferably wherein the panel of one or more CpGs comprises at least ten CpG from DMR 121, and more preferably wherein the cancer index value is the mean β-value for the CpGs denoted by [[CG]] in SEQ ID NO: 5121;
[1230] 243. CpGs whose cancer index value is determined are located within at least DMR 122 defined by SEQ ID NO: 5122, and wherein when the cancer index for the individual is about 0.022 or more the individual is classified as having CIN3 and/or cancer or as having a high risk of CIN3 and/or cancer development, and wherein the sensitivity of the assay is at least 75.00% and the specificity of the assay is at least 75.00%, preferably wherein the panel of one or more CpGs comprises at least three CpG from DMR 122, and more preferably wherein the cancer index value is the mean β-value for the CpGs denoted by [[CG]] in SEQ ID NO: 5122;
[1231] 244. CpGs whose cancer index value is determined are located within at least DMR 122 defined by SEQ ID NO: 5122, and wherein when the cancer index for the individual is less than about 0.022 the individual is classified as not having CIN3 and/or cancer or as having a low risk of CIN3 and/or cancer development, and wherein the sensitivity of the assay is at least 75.00% and the specificity of the assay is at least 75.00%, preferably wherein the panel of one or more CpGs comprises at least three CpG from DMR 122, and more preferably wherein the cancer index value is the mean β-value for the CpGs denoted by [[CG]] in SEQ ID NO: 5122;
[1232] 245. CpGs whose cancer index value is determined are located within at least DMR 123 defined by SEQ ID NO: 5123, and wherein when the cancer index for the individual is about 0.043 or more the individual is classified as having CIN3 and/or cancer or as having a high risk of CIN3 and/or cancer development, and wherein the sensitivity of the assay is at least 74.00% and the specificity of the assay is at least 75.00%, preferably wherein the panel of one or more CpGs comprises at least ten CpG from DMR 123, and more preferably wherein the cancer index value is the mean β-value for the CpGs denoted by [[CG]] in SEQ ID NO: 5123;
[1233] 246. CpGs whose cancer index value is determined are located within at least DMR 123 defined by SEQ ID NO: 5123, and wherein when the cancer index for the individual is less than about 0.043 the individual is classified as not having CIN3 and/or cancer or as having a low risk of CIN3 and/or cancer development, and wherein the sensitivity of the assay is at least 74.00% and the specificity of the assay is at least 75.00%, preferably wherein the panel of one or more CpGs comprises at least ten CpG from DMR 123, and more preferably wherein the cancer index value is the mean β-value for the CpGs denoted by [[CG]] in SEQ ID NO: 5123;
[1234] 247. CpGs whose cancer index value is determined are located within at least DMR 124 defined by SEQ ID NO: 5124, and wherein when the cancer index for the individual is about 0.043 or more the individual is classified as having CIN3 and/or cancer or as having a high risk of CIN3 and/or cancer development, and wherein the sensitivity of the assay is at least 74.00% and the specificity of the assay is at least 75.00%, preferably wherein the panel of one or more CpGs comprises at least ten CpG from DMR 124, and more preferably wherein the cancer index value is the mean β-value for the CpGs denoted by [[CG]] in SEQ ID NO: 5124;
[1235] 248. CpGs whose cancer index value is determined are located within at least DMR 124 defined by SEQ ID NO: 5124, and wherein when the cancer index for the individual is less than about 0.043 the individual is classified as not having CIN3 and/or cancer or as having a low risk of CIN3 and/or cancer development, and wherein the sensitivity of the assay is at least 74.00% and the specificity of the assay is at least 75.00%, preferably wherein the panel of one or more CpGs comprises at least ten CpG from DMR 124, and more preferably wherein the cancer index value is the mean β-value for the CpGs denoted by [[CG]] in SEQ ID NO: 5124;
[1236] 249. CpGs whose cancer index value is determined are located within at least DMR 125 defined by SEQ ID NO: 5125, and wherein when the cancer index for the individual is about 0.043 or more the individual is classified as having CIN3 and/or cancer or as having a high risk of CIN3 and/or cancer development, and wherein the sensitivity of the assay is at least 74.00% and the specificity of the assay is at least 75.00%, preferably wherein the panel of one or more CpGs comprises at least ten CpG from DMR 125, and more preferably wherein the cancer index value is the mean β-value for the CpGs denoted by [[CG]] in SEQ ID NO: 5125;
[1237] 250. CpGs whose cancer index value is determined are located within at least DMR 125 defined by SEQ ID NO: 5125, and wherein when the cancer index for the individual is less than about 0.043 the individual is classified as not having CIN3 and/or cancer or as having a low risk of CIN3 and/or cancer development, and wherein the sensitivity of the assay is at least 74.00% and the specificity of the assay is at least 75.00%, preferably wherein the panel of one or more CpGs comprises at least ten CpG from DMR 125, and more preferably wherein the cancer index value is the mean β-value for the CpGs denoted by [[CG]] in SEQ ID NO: 5125;
[1238] 251. CpGs whose cancer index value is determined are located within at least DMR 126 defined by SEQ ID NO: 5126, and wherein when the cancer index for the individual is about 0.022 or more the individual is classified as having CIN3 and/or cancer or as having a high risk of CIN3 and/or cancer development, and wherein the sensitivity of the assay is at least 75.00% and the specificity of the assay is at least 75.00%, preferably wherein the panel of one or more CpGs comprises at least three CpG from DMR 126, and more preferably wherein the cancer index value is the mean β-value for the CpGs denoted by [[CG]] in SEQ ID NO: 5126;
[1239] 252. CpGs whose cancer index value is determined are located within at least DMR 126 defined by SEQ ID NO: 5126, and wherein when the cancer index for the individual is less than about 0.022 the individual is classified as not having CIN3 and/or cancer or as having a low risk of CIN3 and/or cancer development, and wherein the sensitivity of the assay is at least 75.00% and the specificity of the assay is at least 75.00%, preferably wherein the panel of one or more CpGs comprises at least three CpG from DMR 126, and more preferably wherein the cancer index value is the mean β-value for the CpGs denoted by [[CG]] in SEQ ID NO: 5126;
[1240] 253. CpGs whose cancer index value is determined are located within at least DMR 127 defined by SEQ ID NO: 5127, and wherein when the cancer index for the individual is about 0.043 or more the individual is classified as having CIN3 and/or cancer or as having a high risk of CIN3 and/or cancer development, and wherein the sensitivity of the assay is at least 74.00% and the specificity of the assay is at least 75.00%, preferably wherein the panel of one or more CpGs comprises at least ten CpG from DMR 127, and more preferably wherein the cancer index value is the mean β-value for the CpGs denoted by [[CG]] in SEQ ID NO: 5127;
[1241] 254. CpGs whose cancer index value is determined are located within at least DMR 127 defined by SEQ ID NO: 5127, and wherein when the cancer index for the individual is less than about 0.043 or more the individual is classified as not having cancer or as having a low risk of cancer development, and wherein the sensitivity of the assay is at least 74.00% and the specificity of the assay is at least 75.00%, preferably wherein the panel of one or more CpGs comprises at least ten CpG from DMR 127, and more preferably wherein the cancer index value is the mean β-value for the CpGs denoted by [[CG]] in SEQ ID NO: 5127;
[1242] 255. CpGs whose cancer index value is determined are located within at least DMR 128 defined by SEQ ID NO: 5128, and wherein when the cancer index for the individual is about 0.038 or more the individual is classified as having CIN3 and/or cancer or as having a high risk of CIN3 and/or cancer development, and wherein the sensitivity of the assay is at least 70.00% and the specificity of the assay is at least 75.00%, preferably wherein the panel of one or more CpGs comprises at least five CpG from DMR 128, and more preferably wherein the cancer index value is the mean β-value for the CpGs denoted by [[CG]] in SEQ ID NO: 5128;
[1243] 256. CpGs whose cancer index value is determined are located within at least DMR 128 defined by SEQ ID NO: 5128, and wherein when the cancer index for the individual is less than about 0.038 the individual is classified as not having CIN3 and/or cancer or as having a low risk of CIN3 and/or cancer development, and wherein the sensitivity of the assay is at least 70.00% and the specificity of the assay is at least 75.00%, preferably wherein the panel of one or more CpGs comprises at least five CpG from DMR 128, and more preferably wherein the cancer index value is the mean β-value for the CpGs denoted by [[CG]] in SEQ ID NO: 5128;
[1244] 257. CpGs whose cancer index value is determined are located within at least DMR 129 defined by SEQ ID NO: 5129, and wherein when the cancer index for the individual is about 0.038 or more the individual is classified as having CIN3 and/or cancer or as having a high risk of CIN3 and/or cancer development, and wherein the sensitivity of the assay is at least 70.00% and the specificity of the assay is at least 75.00%, preferably wherein the panel of one or more CpGs comprises at least five CpG from DMR 129, and more preferably wherein the cancer index value is the mean β-value for the CpGs denoted by [[CG]] in SEQ ID NO: 5129;
[1245] 258. CpGs whose cancer index value is determined are located within at least DMR 129 defined by SEQ ID NO: 5129, and wherein when the cancer index for the individual is less than about 0.038 the individual is classified as not having CIN3 and/or cancer or as having a low risk of CIN3 and/or cancer development, and wherein the sensitivity of the assay is at least 70.00% and the specificity of the assay is at least 75.00%, preferably wherein the panel of one or more CpGs comprises at least five CpG from DMR 129, and more preferably wherein the cancer index value is the mean β-value for the CpGs denoted by [[CG]] in SEQ ID NO: 5129;
[1246] 259. CpGs whose cancer index value is determined are located within at least DMR 130 defined by SEQ ID NO: 5130, and wherein when the cancer index for the individual is about 0.029 or more the individual is classified as having CIN3 and/or cancer or as having a high risk of CIN3 and/or cancer development, and wherein the sensitivity of the assay is at least 72.00% and the specificity of the assay is at least 75.00%, preferably wherein the panel of one or more CpGs comprises at least four CpG from DMR 130, and more preferably wherein the cancer index value is the mean β-value for the CpGs denoted by [[CG]] in SEQ ID NO: 5130;
[1247] 260. CpGs whose cancer index value is determined are located within at least DMR 130 defined by SEQ ID NO: 5130, and wherein when the cancer index for the individual is less than about 0.029 the individual is classified as not having CIN3 and/or cancer or as having a low risk of CIN3 and/or cancer development, and wherein the sensitivity of the assay is at least 72.00% and the specificity of the assay is at least 75.00%, DMR 130, and more preferably wherein the cancer index value is the mean β-value for the CpGs denoted by [[CG]] in SEQ ID NO: 5130;
[1248] 261. CpGs whose cancer index value is determined are located within at least DMR 131 defined by SEQ ID NO: 5131, and wherein when the cancer index for the individual is about 0.038 or more the individual is classified as having CIN3 and/or cancer or as having a high risk of CIN3 and/or cancer development, and wherein the sensitivity of the assay is at least 70.00% and the specificity of the assay is at least 75.00%, preferably wherein the panel of one or more CpGs comprises at least five CpG from DMR 131, and more preferably wherein the cancer index value is the mean β-value for the CpGs denoted by [[CG]] in SEQ ID NO: 5131;
[1249] 262. CpGs whose cancer index value is determined are located within at least DMR 131 defined by SEQ ID NO: 5131, and wherein when the cancer index for the individual is less than about 0.038 the individual is classified as not having CIN3 and/or cancer or as having a low risk of CIN3 and/or cancer development, and wherein the sensitivity of the assay is at least 70.00% and the specificity of the assay is at least 75.00%, preferably wherein the panel of one or more CpGs comprises at least five CpG from DMR 131, and more preferably wherein the cancer index value is the mean β-value for the CpGs denoted by [[CG]] in SEQ ID NO: 5131;
[1250] 263. CpGs whose cancer index value is determined are located within at least DMR 132 defined by SEQ ID NO: 5132, and wherein when the cancer index for the individual is about 0.03 or more the individual is classified as having CIN3 and/or cancer or as having a high risk of CIN3 and/or cancer development, and wherein the sensitivity of the assay is at least 77.00% and the specificity of the assay is at least 75.00%, preferably wherein the panel of one or more CpGs comprises at least three CpG from DMR 132, and more preferably wherein the cancer index value is the mean β-value for the CpGs denoted by [[CG]] in SEQ ID NO: 5132;
[1251] 264. CpGs whose cancer index value is determined are located within at least DMR 132 defined by SEQ ID NO: 5132, and wherein when the cancer index for the individual is less than about 0.03 the individual is classified as not having CIN3 and/or cancer or as having a low risk of CIN3 and/or cancer development, and wherein the sensitivity of the assay is at least 77.00% and the specificity of the assay is at least 75.00%, preferably wherein the panel of one or more CpGs comprises at least three CpG from DMR 132, and more preferably wherein the cancer index value is the mean β-value for the CpGs denoted by [[CG]] in SEQ ID NO: 5132;
[1252] 265. CpGs whose cancer index value is determined are located within at least DMR 133 defined by SEQ ID NO: 5133, and wherein when the cancer index for the individual is about 0.036 or more the individual is classified as having CIN3 and/or cancer or as having a high risk of CIN3 and/or cancer development, and wherein the sensitivity of the assay is at least 72.00% and the specificity of the assay is at least 75.00%, preferably wherein the panel of one or more CpGs comprises at least three CpG from DMR 133, and more preferably wherein the cancer index value is the mean β-value for the CpGs denoted by [[CG]] in SEQ ID NO: 5133;
[1253] 266. CpGs whose cancer index value is determined are located within at least DMR 133 defined by SEQ ID NO: 5133, and wherein when the cancer index for the individual is less than about 0.036 the individual is classified as not having CIN3 and/or cancer or as having a low risk of CIN3 and/or cancer development, and wherein the sensitivity of the assay is at least 72.00% and the specificity of the assay is at least 75.00%, preferably wherein the panel of one or more CpGs comprises at least three CpG from DMR 133, and more preferably wherein the cancer index value is the mean β-value for the CpGs denoted by [[CG]] in SEQ ID NO: 5133;
[1254] 267. CpGs whose cancer index value is determined are located within at least DMR 134 defined by SEQ ID NO: 5134, and wherein when the cancer index for the individual is about 0.051 or more the individual is classified as having CIN3 and/or cancer or as having a high risk of CIN3 and/or cancer development, and wherein the sensitivity of the assay is at least 78.00% and the specificity of the assay is at least 75.00%, preferably wherein the panel of one or more CpGs comprises at least four CpG from DMR 134, and more preferably wherein the cancer index value is the mean β-value for the CpGs denoted by [[CG]] in SEQ ID NO: 5134;
[1255] 268. CpGs whose cancer index value is determined are located within at least DMR 134 defined by SEQ ID NO: 5134, and wherein when the cancer index for the individual is less than about 0.051 the individual is classified as not having CIN3 and/or cancer or as having a low risk of CIN3 and/or cancer development, and wherein the sensitivity of the assay is at least 78.00% and the specificity of the assay is at least 75.00%, preferably wherein the panel of one or more CpGs comprises at least four CpG from DMR 134, and more preferably wherein the cancer index value is the mean β-value for the CpGs denoted by [[CG]] in SEQ ID NO: 5134;
[1256] 269. CpGs whose cancer index value is determined are located within at least DMR 135 defined by SEQ ID NO: 5135, and wherein when the cancer index for the individual is about 0.025 or more the individual is classified as having CIN3 and/or cancer or as having a high risk of CIN3 and/or cancer development, and wherein the sensitivity of the assay is at least 76.00% and the specificity of the assay is at least 75.00%, preferably wherein the panel of one or more CpGs comprises at least three CpG from DMR 135, and more preferably wherein the cancer index value is the mean β-value for the CpGs denoted by [[CG]] in SEQ ID NO: 5135;
[1257] 270. CpGs whose cancer index value is determined are located within at least DMR 135 defined by SEQ ID NO: 5135, and wherein when the cancer index for the individual is less than about 0.025 the individual is classified as not having CIN3 and/or cancer or as having a low risk of CIN3 and/or cancer development, and wherein the sensitivity of the assay is at least 76.00% and the specificity of the assay is at least 75.00%, preferably wherein the panel of one or more CpGs comprises at least three CpG from DMR 135, and more preferably wherein the cancer index value is the mean β-value for the CpGs denoted by [[CG]] in SEQ ID NO: 5135;
[1258] 271. CpGs whose cancer index value is determined are located within at least DMR 136 defined by SEQ ID NO: 5136, and wherein when the cancer index for the individual is about 0.036 or more the individual is classified as having CIN3 and/or cancer or as having a high risk of CIN3 and/or cancer development, and wherein the sensitivity of the assay is at least 72.00% and the specificity of the assay is at least 75.00%, preferably wherein the panel of one or more CpGs comprises at least three CpG from DMR 136, and more preferably wherein the cancer index value is the mean β-value for the CpGs denoted by [[CG]] in SEQ ID NO: 5136;
[1259] 272. CpGs whose cancer index value is determined are located within at least DMR 136 defined by SEQ ID NO: 5136, and wherein when the cancer index for the individual is less than about 0.036 the individual is classified as not having CIN3 and/or cancer or as having a low risk of CIN3 and/or cancer development, and wherein the sensitivity of the assay is at least 72.00% and the specificity of the assay is at least 75.00%, preferably wherein the panel of one or more CpGs comprises at least three CpG from DMR 136, and more preferably wherein the cancer index value is the mean β-value for the CpGs denoted by [[CG]] in SEQ ID NO: 5136;
[1260] 273. CpGs whose cancer index value is determined are located within at least DMR 137 defined by SEQ ID NO: 5137, and wherein when the cancer index for the individual is about 0.088 or more the individual is classified as having CIN3 and/or cancer or as having a high risk of CIN3 and/or cancer development, and wherein the sensitivity of the assay is at least 77.00% and the specificity of the assay is at least 75.00%, preferably wherein the panel of one or more CpGs comprises at least three CpG from DMR 137, and more preferably wherein the cancer index value is the mean β-value for the CpGs denoted by [[CG]] in SEQ ID NO: 5137;
[1261] 274. CpGs whose cancer index value is determined are located within at least DMR 137 defined by SEQ ID NO: 5137, and wherein when the cancer index for the individual is less than about 0.088 the individual is classified as not having CIN3 and/or cancer or as having a low risk of CIN3 and/or cancer development, and wherein the sensitivity of the assay is at least 77.00% and the specificity of the assay is at least 75.00%, preferably wherein the panel of one or more CpGs comprises at least three CpG from DMR 137, and more preferably wherein the cancer index value is the mean β-value for the CpGs denoted by [[CG]] in SEQ ID NO: 5137;
[1262] 275. CpGs whose cancer index value is determined are located within at least DMR 138 defined by SEQ ID NO: 5138, and wherein when the cancer index for the individual is about 0.088 or more the individual is classified as having CIN3 and/or cancer or as having a high risk of CIN3 and/or cancer development, and wherein the sensitivity of the assay is at least 77.00% and the specificity of the assay is at least 75.00%, preferably wherein the panel of one or more CpGs comprises at least three CpG from DMR 138, and more preferably wherein the cancer index value is the mean β-value for the CpGs denoted by [[CG]] in SEQ ID NO: 5138;
[1263] 276. CpGs whose cancer index value is determined are located within at least DMR 138 defined by SEQ ID NO: 5138, and wherein when the cancer index for the individual is less than about 0.088 the individual is classified as not having CIN3 and/or cancer or as having a low risk of CIN3 and/or cancer development, and wherein the sensitivity of the assay is at least 77.00% and the specificity of the assay is at least 75.00%, preferably wherein the panel of one or more CpGs comprises at least three CpG from DMR 138, and more preferably wherein the cancer index value is the mean β-value for the CpGs denoted by [[CG]] in SEQ ID NO: 5138;
[1264] 277. CpGs whose cancer index value is determined are located within at least DMR 139 defined by SEQ ID NO: 5139, and wherein when the cancer index for the individual is about 0.04 or more the individual is classified as having CIN3 and/or cancer or as having a high risk of CIN3 and/or cancer development, and wherein the sensitivity of the assay is at least 76.00% and the specificity of the assay is at least 75.00%, preferably wherein the panel of one or more CpGs comprises at least four CpG from DMR 139, and more preferably wherein the cancer index value is the mean β-value for the CpGs denoted by [[CG]] in SEQ ID NO: 5139;
[1265] 278. CpGs whose cancer index value is determined are located within at least DMR 139 defined by SEQ ID NO: 5139, and wherein when the cancer index for the individual is less than about 0.04 the individual is classified as not having CIN3 and/or cancer or as having a low risk of CIN3 and/or cancer development, and wherein the sensitivity of the assay is at least 76.00% and the specificity of the assay is at least 75.00%, preferably wherein the panel of one or more CpGs comprises at least four CpG from DMR 139, and more preferably wherein the cancer index value is the mean β-value for the CpGs denoted by [[CG]] in SEQ ID NO: 5139;
[1266] 279. CpGs whose cancer index value is determined are located within at least DMR 140 defined by SEQ ID NO: 5140, and wherein when the cancer index for the individual is about 0.099 or more the individual is classified as having CIN3 and/or cancer or as having a high risk of CIN3 and/or cancer development, and wherein the sensitivity of the assay is at least 74.00% and the specificity of the assay is at least 75.00%, preferably wherein the panel of one or more CpGs comprises at least eight CpG from DMR 140, and more preferably wherein the cancer index value is the mean β-value for the CpGs denoted by [[CG]] in SEQ ID NO: 5140;
[1267] 280. CpGs whose cancer index value is determined are located within at least DMR 140 defined by SEQ ID NO: 5140, and wherein when the cancer index for the individual is less than about 0.099 the individual is classified as not having CIN3 and/or cancer or as having a low risk of CIN3 and/or cancer development, and wherein the sensitivity of the assay is at least 74.00% and the specificity of the assay is at least 75.00%, preferably wherein the panel of one or more CpGs comprises at least eight CpG from DMR 140, and more preferably wherein the cancer index value is the mean β-value for the CpGs denoted by [[CG]] in SEQ ID NO: 5140;
[1268] 281. CpGs whose cancer index value is determined are located within at least DMR 141 defined by SEQ ID NO: 5141, and wherein when the cancer index for the individual is about 0.044 or more the individual is classified as having CIN3 and/or cancer or as having a high risk of CIN3 and/or cancer development, and wherein the sensitivity of the assay is at least 74.00% and the specificity of the assay is at least 75.00%, preferably wherein the panel of one or more CpGs comprises at least four CpG from DMR 141, and more preferably wherein the cancer index value is the mean β-value for the CpGs denoted by [[CG]] in SEQ ID NO: 5141;
[1269] 282. CpGs whose cancer index value is determined are located within at least DMR 141 defined by SEQ ID NO: 5141, and wherein when the cancer index for the individual is less than about 0.044 the individual is classified as not having CIN3 and/or cancer or as having a low risk of CIN3 and/or cancer development, and wherein the sensitivity of the assay is at least 74.00% and the specificity of the assay is at least 75.00%, preferably wherein the panel of one or more CpGs comprises at least four CpG from DMR 141, and more preferably wherein the cancer index value is the mean β-value for the CpGs denoted by [[CG]] in SEQ ID NO: 5141;
[1270] 283. CpGs whose cancer index value is determined are located within at least DMR 142 defined by SEQ ID NO: 5142, and wherein when the cancer index for the individual is about 0.029 or more the individual is classified as having CIN3 and/or cancer or as having a high risk of CIN3 and/or cancer development, and wherein the sensitivity of the assay is at least 70.00% and the specificity of the assay is at least 75.00%, DMR 142, and more preferably wherein the cancer index value is the mean β-value for the CpGs denoted by [[CG]] in SEQ ID NO: 5142;
[1271] 284. CpGs whose cancer index value is determined are located within at least DMR 142 defined by SEQ ID NO: 5142, and wherein when the cancer index for the individual is less than about 0.029 the individual is classified as not having CIN3 and/or cancer or as having a low risk of CIN3 and/or cancer development, and wherein the sensitivity of the assay is at least 70.00% and the specificity of the assay is at least 75.00%, preferably wherein the panel of one or more CpGs comprises at least four CpG from DMR 142, and more preferably wherein the cancer index value is the mean β-value for the CpGs denoted by [[CG]] in SEQ ID NO: 5142;
[1272] 285. CpGs whose cancer index value is determined are located within at least DMR 143 defined by SEQ ID NO: 5143, and wherein when the cancer index for the individual is about 0.07 or more the individual is classified as having CIN3 and/or cancer or as having a high risk of CIN3 and/or cancer development, and wherein the sensitivity of the assay is at least 74.00% and the specificity of the assay is at least 75.00%, preferably wherein the panel of one or more CpGs comprises at least six CpG from DMR 143, and more preferably wherein the cancer index value is the mean β-value for the CpGs denoted by [[CG]] in SEQ ID NO: 5143;
[1273] 286. CpGs whose cancer index value is determined are located within at least DMR 143 defined by SEQ ID NO: 5143, and wherein when the cancer index for the individual is less than about 0.07 the individual is classified as not having CIN3 and/or cancer or as having a low risk of CIN3 and/or cancer development, and wherein the sensitivity of the assay is at least 74.00% and the specificity of the assay is at least 75.00%, preferably wherein the panel of one or more CpGs comprises at least six CpG from DMR 143, and more preferably wherein the cancer index value is the mean β-value for the CpGs denoted by [[CG]] in SEQ ID NO: 5143;
[1274] 287. CpGs whose cancer index value is determined are located within at least DMR 144 defined by SEQ ID NO: 5144, and wherein when the cancer index for the individual is about 0.02 or more the individual is classified as having CIN3 and/or cancer or as having a high risk of CIN3 and/or cancer development, and wherein the sensitivity of the assay is at least 71.00% and the specificity of the assay is at least 75.00%, preferably wherein the panel of one or more CpGs comprises at least four CpG from DMR 144, and more preferably wherein the cancer index value is the mean β-value for the CpGs denoted by [[CG]] in SEQ ID NO: 5144;
[1275] 288. CpGs whose cancer index value is determined are located within at least DMR 144 defined by SEQ ID NO: 5144, and wherein when the cancer index for the individual is less than about 0.02 the individual is classified as not having CIN3 and/or cancer or as having a low risk of CIN3 and/or cancer development, and wherein the sensitivity of the assay is at least 71.00% and the specificity of the assay is at least 75.00%, preferably wherein the panel of one or more CpGs comprises at least four CpG from DMR 144, and more preferably wherein the cancer index value is the mean β-value for the CpGs denoted by [[CG]] in SEQ ID NO: 5144;
[1276] 289. CpGs whose cancer index value is determined are located within at least DMR 145 defined by SEQ ID NO: 5145, and wherein when the cancer index for the individual is about 0.029 or more the individual is classified as having CIN3 and/or cancer or as having a high risk of CIN3 and/or cancer development, and wherein the sensitivity of the assay is at least 70.00% and the specificity of the assay is at least 75.00%, preferably wherein the panel of one or more CpGs comprises at least four CpG from DMR 145, and more preferably wherein the cancer index value is the mean β-value for the CpGs denoted by [[CG]] in SEQ ID NO: 5145;
[1277] 290. CpGs whose cancer index value is determined are located within at least DMR 145 defined by SEQ ID NO: 5145, and wherein when the cancer index for the individual is less than about 0.029 the individual is classified as not having CIN3 and/or cancer or as having a low risk of CIN3 and/or cancer development, and wherein the sensitivity of the assay is at least 70.00% and the specificity of the assay is at least 75.00%, preferably wherein the panel of one or more CpGs comprises at least four CpG from DMR 145, and more preferably wherein the cancer index value is the mean β-value for the CpGs denoted by [[CG]] in SEQ ID NO: 5145;
[1278] 291. CpGs whose cancer index value is determined are located within at least DMR 146 defined by SEQ ID NO: 5146, and wherein when the cancer index for the individual is about 0.065 or more the individual is classified as having CIN3 and/or cancer or as having a high risk of CIN3 and/or cancer development, and wherein the sensitivity of the assay is at least 77.00% and the specificity of the assay is at least 75.00%, preferably wherein the panel of one or more CpGs comprises at least two CpG from DMR 146, and more preferably wherein the cancer index value is the mean β-value for the CpGs denoted by [[CG]] in SEQ ID NO: 5146;
[1279] 292. CpGs whose cancer index value is determined are located within at least DMR 146 defined by SEQ ID NO: 5146, and wherein when the cancer index for the individual is less than about 0.065 the individual is classified as not having CIN3 and/or cancer or as having a low risk of CIN3 and/or cancer development, and wherein the sensitivity of the assay is at least 77.00% and the specificity of the assay is at least 75.00%, preferably wherein the panel of one or more CpGs comprises at least two CpG from DMR 146, and more preferably wherein the cancer index value is the mean β-value for the CpGs denoted by [[CG]] in SEQ ID NO: 5146;
[1280] 293. CpGs whose cancer index value is determined are located within at least DMR 147 defined by SEQ ID NO: 5147, and wherein when the cancer index for the individual is about 0.084 or more the individual is classified as having CIN3 and/or cancer or as having a high risk of CIN3 and/or cancer development, and wherein the sensitivity of the assay is at least 76.00% and the specificity of the assay is at least 75.00%, preferably wherein the panel of one or more CpGs comprises at least five CpG from DMR 147, and more preferably wherein the cancer index value is the mean β-value for the CpGs denoted by [[CG]] in SEQ ID NO: 5147;
[1281] 294. CpGs whose cancer index value is determined are located within at least DMR 147 defined by SEQ ID NO: 5147, and wherein when the cancer index for the individual is less than about 0.084 the individual is classified as not having CIN3 and/or cancer or as having a low risk of CIN3 and/or cancer development, and wherein the sensitivity of the assay is at least 76.00% and the specificity of the assay is at least 75.00%, preferably wherein the panel of one or more CpGs comprises at least five CpG from DMR 147, and more preferably wherein the cancer index value is the mean β-value for the CpGs denoted by [[CG]] in SEQ ID NO: 5147;
[1282] 295. CpGs whose cancer index value is determined are located within at least DMR 148 defined by SEQ ID NO: 5148, and wherein when the cancer index for the individual is about 0.084 or more the individual is classified as having CIN3 and/or cancer or as having a high risk of CIN3 and/or cancer development, and wherein the sensitivity of the assay is at least 76.00% and the specificity of the assay is at least 75.00%, preferably wherein the panel of one or more CpGs comprises at least five CpG from DMR 148, and more preferably wherein the cancer index value is the mean β-value for the CpGs denoted by [[CG]] in SEQ ID NO: 5148;
[1283] 296. CpGs whose cancer index value is determined are located within at least DMR 148 defined by SEQ ID NO: 5148, and wherein when the cancer index for the individual is less than about 0.084 the individual is classified as not having CIN3 and/or cancer or as having a low risk of CIN3 and/or cancer development, and wherein the sensitivity of the assay is at least 76.00% and the specificity of the assay is at least 75.00%, preferably wherein the panel of one or more CpGs comprises at least five CpG from DMR 148, and more preferably wherein the cancer index value is the mean β-value for the CpGs denoted by [[CG]] in SEQ ID NO: 5148;
[1284] 297. CpGs whose cancer index value is determined are located within at least DMR 149 defined by SEQ ID NO: 5149, and wherein when the cancer index for the individual is about 0.084 or more the individual is classified as having CIN3 and/or cancer or as having a high risk of CIN3 and/or cancer development, and wherein the sensitivity of preferably wherein the panel of one or more CpGs comprises at least five CpG from DMR 149, and more preferably wherein the cancer index value is the mean β-value for the CpGs denoted by [[CG]] in SEQ ID NO: 5149;
[1285] 298. CpGs whose cancer index value is determined are located within at least DMR 149 defined by SEQ ID NO: 5149, and wherein when the cancer index for the individual is less than about 0.084 the individual is classified as not having CIN3 and/or cancer or as having a low risk of CIN3 and/or cancer development, and wherein the sensitivity of the assay is at least 76.00% and the specificity of the assay is at least 75.00%, preferably wherein the panel of one or more CpGs comprises at least five CpG from DMR 149, and more preferably wherein the cancer index value is the mean β-value for the CpGs denoted by [[CG]] in SEQ ID NO: 5149;
[1286] 299. CpGs whose cancer index value is determined are located within at least DMR 150 defined by SEQ ID NO: 5150, and wherein when the cancer index for the individual is about 0.058 or more the individual is classified as having CIN3 and/or cancer or as having a high risk of CIN3 and/or cancer development, and wherein the sensitivity of the assay is at least 72.00% and the specificity of the assay is at least 75.00%, preferably wherein the panel of one or more CpGs comprises at least seven CpG from DMR 150, and more preferably wherein the cancer index value is the mean β-value for the CpGs denoted by [[CG]] in SEQ ID NO: 5150;
[1287] 300. CpGs whose cancer index value is determined are located within at least DMR 150 defined by SEQ ID NO: 5150, and wherein when the cancer index for the individual is less than about 0.058 the individual is classified as not having CIN3 and/or cancer or as having a low risk of CIN3 and/or cancer development, and wherein the sensitivity of the assay is at least 72.00% and the specificity of the assay is at least 75.00%, preferably wherein the panel of one or more CpGs comprises at least seven CpG from DMR 150, and more preferably wherein the cancer index value is the mean β-value for the CpGs denoted by [[CG]] in SEQ ID NO: 5150;
[1288] 301. CpGs whose cancer index value is determined are located within at least DMR 151 defined by SEQ ID NO: 5151, and wherein when the cancer index for the individual is about 0.058 or more the individual is classified as having CIN3 and/or cancer or as having a high risk of CIN3 and/or cancer development, and wherein the sensitivity of the assay is at least 72.00% and the specificity of the assay is at least 75.00%, preferably wherein the panel of one or more CpGs comprises at least seven CpG from DMR 151, and more preferably wherein the cancer index value is the mean β-value for the CpGs denoted by [[CG]] in SEQ ID NO: 5151;
[1289] 302. CpGs whose cancer index value is determined are located within at least DMR 151 defined by SEQ ID NO: 5151, and wherein when the cancer index for the individual is less than about 0.058 the individual is classified as not having CIN3 and/or cancer or as having a low risk of CIN3 and/or cancer development, and wherein the sensitivity of the assay is at least 72.00% and the specificity of the assay is at least 75.00%, preferably wherein the panel of one or more CpGs comprises at least seven CpG from DMR 151, and more preferably wherein the cancer index value is the mean β-value for the CpGs denoted by [[CG]] in SEQ ID NO: 5151;
[1290] 303. CpGs whose cancer index value is determined are located within at least DMR 152 defined by SEQ ID NO: 5152, and wherein when the cancer index for the individual is about 0.027 or more the individual is classified as having CIN3 and/or cancer or as having a high risk of CIN3 and/or cancer development, and wherein the sensitivity of the assay is at least 74.00% and the specificity of the assay is at least 75.00%, preferably wherein the panel of one or more CpGs comprises at least seven CpG from DMR 152, and more preferably wherein the cancer index value is the mean β-value for the CpGs denoted by [[CG]] in SEQ ID NO: 5152;
[1291] 304. CpGs whose cancer index value is determined are located within at least DMR 152 defined by SEQ ID NO: 5152, and wherein when the cancer index for the individual is less than about 0.027 the individual is classified as not having CIN3 and/or cancer or as having a low risk of CIN3 and/or cancer development, and wherein the sensitivity of the assay is at least 74.00% and the specificity of the assay is at least 75.00%, preferably wherein the panel of one or more CpGs comprises at least seven CpG from DMR 152, and more preferably wherein the cancer index value is the mean β-value for the CpGs denoted by [[CG]] in SEQ ID NO: 5152;
[1292] 305. CpGs whose cancer index value is determined are located within at least DMR 153 defined by SEQ ID NO: 5153, and wherein when the cancer index for the individual is about 0.027 or more the individual is classified as having CIN3 and/or cancer or as having a high risk of CIN3 and/or cancer development, and wherein the sensitivity of the assay is at least 74.00% and the specificity of the assay is at least 75.00%, preferably wherein the panel of one or more CpGs comprises at least seven CpG from DMR 153, and more preferably wherein the cancer index value is the mean β-value for the CpGs denoted by [[CG]] in SEQ ID NO: 5153;
[1293] 306. CpGs whose cancer index value is determined are located within at least DMR 153 defined by SEQ ID NO: 5153, and wherein when the cancer index for the individual is less than about 0.027 the individual is classified as not having CIN3 and/or cancer or as having a low risk of CIN3 and/or cancer development, and wherein the sensitivity of the assay is at least 74.00% and the specificity of the assay is at least 75.00%, preferably wherein the panel of one or more CpGs comprises at least seven CpG from DMR 153, and more preferably wherein the cancer index value is the mean β-value for the CpGs denoted by [[CG]] in SEQ ID NO: 5153;
[1294] 307. CpGs whose cancer index value is determined are located within at least DMR 154 defined by SEQ ID NO: 5154, and wherein when the cancer index for the individual is about 0.042 or more the individual is classified as having CIN3 and/or cancer or as having a high risk of CIN3 and/or cancer development, and wherein the sensitivity of the assay is at least 71.00% and the specificity of the assay is at least 75.00%, preferably wherein the panel of one or more CpGs comprises at least nine CpG from DMR 154, and more preferably wherein the cancer index value is the mean β-value for the CpGs denoted by [[CG]] in SEQ ID NO: 5154;
[1295] 308. CpGs whose cancer index value is determined are located within at least DMR 154 defined by SEQ ID NO: 5154, and wherein when the cancer index for the individual is less than about 0.042 the individual is classified as not having CIN3 and/or cancer or as having a low risk of CIN3 and/or cancer development, and wherein the sensitivity of the assay is at least 71.00% and the specificity of the assay is at least 75.00%, preferably wherein the panel of one or more CpGs comprises at least nine CpG from DMR 154, and more preferably wherein the cancer index value is the mean β-value for the CpGs denoted by [[CG]] in SEQ ID NO: 5154;
[1296] 309. CpGs whose cancer index value is determined are located within at least DMR 155 defined by SEQ ID NO: 5155, and wherein when the cancer index for the individual is about 0.042 or more the individual is classified as having CIN3 and/or cancer or as having a high risk of CIN3 and/or cancer development, and wherein the sensitivity of the assay is at least 71.00% and the specificity of the assay is at least 75.00%, preferably wherein the panel of one or more CpGs comprises at least nine CpG from DMR 155, and more preferably wherein the cancer index value is the mean β-value for the CpGs denoted by [[CG]] in SEQ ID NO: 5155;
[1297] 310. CpGs whose cancer index value is determined are located within at least DMR 155 defined by SEQ ID NO: 5155, and wherein when the cancer index for the individual is less than about 0.042 the individual is classified as not having CIN3 and/or cancer or as having a low risk of CIN3 and/or cancer development, and wherein the sensitivity of the assay is at least 71.00% and the specificity of the assay is at least 75.00%, preferably wherein the panel of one or more CpGs comprises at least nine CpG from DMR 155, and more preferably wherein the cancer index value is the mean β-value for the CpGs denoted by [[CG]] in SEQ ID NO: 5155;
[1298] 311. CpGs whose cancer index value is determined are located within at least DMR 156 defined by SEQ ID NO: 5156, and wherein when the cancer index for the individual is about 0.034 or more the individual is classified as having CIN3 and/or cancer or as having a high risk of CIN3 and/or cancer development, and wherein the sensitivity of the assay is at least 74.00% and the specificity of the assay is at least 75.00%, preferably wherein the panel of one or more CpGs comprises at least four CpG from DMR 156, and more preferably wherein the cancer index value is the mean β-value for the CpGs denoted by [[CG]] in SEQ ID NO: 5156;
[1299] 312. CpGs whose cancer index value is determined are located within at least DMR 156 defined by SEQ ID NO: 5156, and wherein when the cancer index for the individual is less than about 0.034 the individual is classified as not having CIN3 and/or cancer or as having a low risk of CIN3 and/or cancer development, and wherein the sensitivity of the assay is at least 74.00% and the specificity of the assay is at least 75.00%, preferably wherein the panel of one or more CpGs comprises at least four CpG from DMR 156, and more preferably wherein the cancer index value is the mean β-value for the CpGs denoted by [[CG]] in SEQ ID NO: 5156;
[1300] 313. CpGs whose cancer index value is determined are located within at least DMR 157 defined by SEQ ID NO: 5157, and wherein when the cancer index for the individual is about 0.042 or more the individual is classified as having CIN3 and/or cancer or as having a high risk of CIN3 and/or cancer development, and wherein the sensitivity of the assay is at least 71.00% and the specificity of the assay is at least 75.00%, preferably wherein the panel of one or more CpGs comprises at least nine CpG from DMR 157, and more preferably wherein the cancer index value is the mean β-value for the CpGs denoted by [[CG]] in SEQ ID NO: 5157;
[1301] 314. CpGs whose cancer index value is determined are located within at least DMR 157 defined by SEQ ID NO: 5157, and wherein when the cancer index for the individual is less than about 0.042 the individual is classified as not having CIN3 and/or cancer or as having a low risk of CIN3 and/or cancer development, and wherein the sensitivity of the assay is at least 71.00% and the specificity of the assay is at least 75.00%, preferably wherein the panel of one or more CpGs comprises at least nine CpG from DMR 157, and more preferably wherein the cancer index value is the mean β-value for the CpGs denoted by [[CG]] in SEQ ID NO: 5157;
[1302] 315. CpGs whose cancer index value is determined are located within at least DMR 158 defined by SEQ ID NO: 5158, and wherein when the cancer index for the individual is about 0.042 or more the individual is classified as having CIN3 and/or cancer or as having a high risk of CIN3 and/or cancer development, and wherein the sensitivity of the assay is at least 71.00% and the specificity of the assay is at least 75.00%, preferably wherein the panel of one or more CpGs comprises at least nine CpG from DMR 158, and more preferably wherein the cancer index value is the mean β-value for the CpGs denoted by [[CG]] in SEQ ID NO: 5158;
[1303] 316. CpGs whose cancer index value is determined are located within at least DMR 158 defined by SEQ ID NO: 5158, and wherein when the cancer index for the individual is less than about 0.042 the individual is classified as not having CIN3 and/or cancer or as having a low risk of CIN3 and/or cancer development, and wherein the sensitivity of the assay is at least 71.00% and the specificity of the assay is at least 75.00%, preferably wherein the panel of one or more CpGs comprises at least nine CpG from DMR 158, and more preferably wherein the cancer index value is the mean β-value for the CpGs denoted by [[CG]] in SEQ ID NO: 5158;
[1304] 317. CpGs whose cancer index value is determined are located within at least DMR 159 defined by SEQ ID NO: 5159, and wherein when the cancer index for the individual is about 0.027 or more the individual is classified as having CIN3 and/or cancer or as having a high risk of CIN3 and/or cancer development, and wherein the sensitivity of the assay is at least 74.00% and the specificity of the assay is at least 75.00%, preferably wherein the panel of one or more CpGs comprises at least four CpG from DMR 159, and more preferably wherein the cancer index value is the mean β-value for the CpGs denoted by [[CG]] in SEQ ID NO: 5159;
[1305] 318. CpGs whose cancer index value is determined are located within at least DMR 159 defined by SEQ ID NO: 5159, and wherein when the cancer index for the individual is less than about 0.027 the individual is classified as not having CIN3 and/or cancer or as having a low risk of CIN3 and/or cancer development, and wherein the sensitivity of the assay is at least 74.00% and the specificity of the assay is at least 75.00%, preferably wherein the panel of one or more CpGs comprises at least four CpG from DMR 159, and more preferably wherein the cancer index value is the mean β-value for the CpGs denoted by [[CG]] in SEQ ID NO: 5159;
[1306] 319. CpGs whose cancer index value is determined are located within at least DMR 160 defined by SEQ ID NO: 5160, and wherein when the cancer index for the individual is about 0.034 or more the individual is classified as having CIN3 and/or cancer or as having a high risk of CIN3 and/or cancer development, and wherein the sensitivity of the assay is at least 74.00% and the specificity of the assay is at least 75.00%, preferably wherein the panel of one or more CpGs comprises at least four CpG from DMR 160, and more preferably wherein the cancer index value is the mean β-value for the CpGs denoted by [[CG]] in SEQ ID NO: 5160;
[1307] 320. CpGs whose cancer index value is determined are located within at least DMR 160 defined by SEQ ID NO: 5160, and wherein when the cancer index for the individual is less than about 0.034 the individual is classified as not having CIN3 and/or cancer or as having a low risk of CIN3 and/or cancer development, and wherein the sensitivity of the assay is at least 74.00% and the specificity of the assay is at least 75.00%, preferably wherein the panel of one or more CpGs comprises at least four CpG from DMR 160, and more preferably wherein the cancer index value is the mean β-value for the CpGs denoted by [[CG]] in SEQ ID NO: 5160;
[1308] 321. CpGs whose cancer index value is determined are located within at least DMR 161 defined by SEQ ID NO: 5161, and wherein when the cancer index for the individual is about 0.027 or more the individual is classified as having CIN3 and/or cancer or as having a high risk of CIN3 and/or cancer development, and wherein the sensitivity of the assay is at least 74.00% and the specificity of the assay is at least 75.00%, preferably wherein the panel of one or more CpGs comprises at least seven CpG from DMR 161, and more preferably wherein the cancer index value is the mean β-value for the CpGs denoted by [[CG]] in SEQ ID NO: 5161;
[1309] 322. CpGs whose cancer index value is determined are located within at least DMR 161 defined by SEQ ID NO: 5161, and wherein when the cancer index for the individual is less than about 0.027 the individual is classified as not having CIN3 and/or cancer or as having a low risk of CIN3 and/or cancer development, and wherein the sensitivity of the assay is at least 74.00% and the specificity of the assay is at least 75.00%, preferably wherein the panel of one or more CpGs comprises at least seven CpG from DMR 161, and more preferably wherein the cancer index value is the mean β-value for the CpGs denoted by [[CG]] in SEQ ID NO: 5161;
[1310] 323. CpGs whose cancer index value is determined are located within at least DMR 162 defined by SEQ ID NO: 5162, and wherein when the cancer index for the individual is about 0.027 or more the individual is classified as having CIN3 and/or cancer or as having a high risk of CIN3 and/or cancer development, and wherein the sensitivity of the assay is at least 74.00% and the specificity of the assay is at least 75.00%, preferably wherein the panel of one or more CpGs comprises at least seven CpG from DMR 162, and more preferably wherein the cancer index value is the mean β-value for the CpGs denoted by [[CG]] in SEQ ID NO: 5162;
[1311] 324. CpGs whose cancer index value is determined are located within at least DMR 162 defined by SEQ ID NO: 5162, and wherein when the cancer index for the individual is less than about 0.027 the individual is classified as not having CIN3 and/or cancer or as having a low risk of CIN3 and/or cancer development, and wherein the sensitivity of the assay is at least 74.00% and the specificity of the assay is at least 75.00%, preferably wherein the panel of one or more CpGs comprises at least seven CpG from DMR 162, and more preferably wherein the cancer index value is the mean β-value for the CpGs denoted by [[CG]] in SEQ ID NO: 5162;
[1312] 325. CpGs whose cancer index value is determined are located within at least DMR 163 defined by SEQ ID NO: 5163, and wherein when the cancer index for the individual is about 0.027 or more the individual is classified as having CIN3 and/or cancer or as having a high risk of CIN3 and/or cancer development, and wherein the sensitivity of the assay is at least 74.00% and the specificity of the assay is at least 75.00%, preferably wherein the panel of one or more CpGs comprises at least seven CpG from DMR 163, and more preferably wherein the cancer index value is the mean β-value for the CpGs denoted by [[CG]] in SEQ ID NO: 5163;
[1313] 326. CpGs whose cancer index value is determined are located within at least DMR 163 defined by SEQ ID NO: 5163, and wherein when the cancer index for the individual is less than about 0.027 the individual is classified as not having CIN3 and/or cancer or as having a low risk of CIN3 and/or cancer development, and wherein the sensitivity of the assay is at least 74.00% and the specificity of the assay is at least 75.00%, preferably wherein the panel of one or more CpGs comprises at least seven CpG from DMR 163, and more preferably wherein the cancer index value is the mean β-value for the CpGs denoted by [[CG]] in SEQ ID NO: 5163;
[1314] 327. CpGs whose cancer index value is determined are located within at least DMR 164 defined by SEQ ID NO: 5164, and wherein when the cancer index for the individual is about 0.095 or more the individual is classified as having CIN3 and/or cancer or as having a high risk of CIN3 and/or cancer development, and wherein the sensitivity of the assay is at least 76.00% and the specificity of the assay is at least 75.00%, preferably wherein the panel of one or more CpGs comprises at least six CpG from DMR 164, and more preferably wherein the cancer index value is the mean β-value for the CpGs denoted by [[CG]] in SEQ ID NO: 5164;
[1315] 328. CpGs whose cancer index value is determined are located within at least DMR 164 defined by SEQ ID NO: 5164, and wherein when the cancer index for the individual is less than about 0.095 the individual is classified as not having CIN3 and/or cancer or as having a low risk of CIN3 and/or cancer development, and wherein the sensitivity of the assay is at least 76.00% and the specificity of the assay is at least 75.00%, preferably wherein the panel of one or more CpGs comprises at least six CpG from DMR 164, and more preferably wherein the cancer index value is the mean β-value for the CpGs denoted by [[CG]] in SEQ ID NO: 5164;
[1316] 329. CpGs whose cancer index value is determined are located within at least DMR 165 defined by SEQ ID NO: 5165, and wherein when the cancer index for the individual is about 0.054 or more the individual is classified as having CIN3 and/or cancer or as having a high risk of CIN3 and/or cancer development, and wherein the sensitivity of the assay is at least 76.00% and the specificity of the assay is at least 75.00%, preferably wherein the panel of one or more CpGs comprises at least seven CpG from DMR 165, and more preferably wherein the cancer index value is the mean β-value for the CpGs denoted by [[CG]] in SEQ ID NO: 5165;
[1317] 330. CpGs whose cancer index value is determined are located within at least DMR 165 defined by SEQ ID NO: 5165, and wherein when the cancer index for the individual is less than about 0.054 the individual is classified as not having CIN3 and/or cancer or as having a low risk of CIN3 and/or cancer development, and wherein the sensitivity of the assay is at least 76.00% and the specificity of the assay is at least 75.00%, preferably wherein the panel of one or more CpGs comprises at least seven CpG from DMR 165, and more preferably wherein the cancer index value is the mean β-value for the CpGs denoted by [[CG]] in SEQ ID NO: 5165;
[1318] 331. CpGs whose cancer index value is determined are located within at least DMR 166 defined by SEQ ID NO: 5166, and wherein when the cancer index for the individual is about 0.042 or more the individual is classified as having CIN3 and/or cancer or as having a high risk of CIN3 and/or cancer development, and wherein the sensitivity of the assay is at least 71.00% and the specificity of the assay is at least 75.00%, preferably wherein the panel of one or more CpGs comprises at least ten CpG from DMR 166, and more preferably wherein the cancer index value is the mean β-value for the CpGs denoted by [[CG]] in SEQ ID NO: 5166;
[1319] 332. CpGs whose cancer index value is determined are located within at least DMR 166 defined by SEQ ID NO: 5166, and wherein when the cancer index for the individual is less than about 0.042 or more the individual is classified as not having cancer or as having a low risk of cancer development, and wherein the sensitivity of the assay is at least 71.00% and the specificity of the assay is at least 75.00%, preferably wherein the panel of one or more CpGs comprises at least ten CpG from DMR 166, and more preferably wherein the cancer index value is the mean β-value for the CpGs denoted by [[CG]] in SEQ ID NO: 5166;
[1320] 333. CpGs whose cancer index value is determined are located within at least DMR 167 defined by SEQ ID NO: 5167, and wherein when the cancer index for the individual is about 0.054 or more the individual is classified as having CIN3 and/or cancer or as having a high risk of CIN3 and/or cancer development, and wherein the sensitivity of the assay is at least 76.00% and the specificity of the assay is at least 75.00%, preferably wherein the panel of one or more CpGs comprises at least seven CpG from DMR 167, and more preferably wherein the cancer index value is the mean β-value for the CpGs denoted by [[CG]] in SEQ ID NO: 5167;
[1321] 334. CpGs whose cancer index value is determined are located within at least DMR 167 defined by SEQ ID NO: 5167, and wherein when the cancer index for the individual is less than about 0.054 the individual is classified as not having CIN3 and/or cancer or as having a low risk of CIN3 and/or cancer development, and wherein the sensitivity of the assay is at least 76.00% and the specificity of the assay is at least 75.00%, preferably wherein the panel of one or more CpGs comprises at least seven CpG from DMR 167, and more preferably wherein the cancer index value is the mean β-value for the CpGs denoted by [[CG]] in SEQ ID NO: 5167;
[1322] 335. CpGs whose cancer index value is determined are located within at least DMR 168 defined by SEQ ID NO: 5168, and wherein when the cancer index for the individual is about 0.051 or more the individual is classified as having CIN3 and/or cancer or as having a high risk of CIN3 and/or cancer development, and wherein the sensitivity of the assay is at least 75.00% and the specificity of the assay is at least 75.00%, preferably wherein the panel of one or more CpGs comprises at least three CpG from DMR 168, and more preferably wherein the cancer index value is the mean β-value for the CpGs denoted by [[CG]] in SEQ ID NO: 5168;
[1323] 336. CpGs whose cancer index value is determined are located within at least DMR 168 defined by SEQ ID NO: 5168, and wherein when the cancer index for the individual is less than about 0.051 the individual is classified as not having CIN3 and/or cancer or as having a low risk of CIN3 and/or cancer development, and wherein the sensitivity of the assay is at least 75.00% and the specificity of the assay is at least 75.00%, preferably wherein the panel of one or more CpGs comprises at least three CpG from DMR 168, and more preferably wherein the cancer index value is the mean β-value for the CpGs denoted by [[CG]] in SEQ ID NO: 5168;
[1324] 337. CpGs whose cancer index value is determined are located within at least DMR 169 defined by SEQ ID NO: 5169, and wherein when the cancer index for the individual is about 0.051 or more the individual is classified as having CIN3 and/or cancer or as having a high risk of CIN3 and/or cancer development, and wherein the sensitivity of the assay is at least 75.00% and the specificity of the assay is at least 75.00%, preferably wherein the panel of one or more CpGs comprises at least three CpG from DMR 169, and more preferably wherein the cancer index value is the mean β-value for the CpGs denoted by [[CG]] in SEQ ID NO: 5169;
[1325] 338. CpGs whose cancer index value is determined are located within at least DMR 169 defined by SEQ ID NO: 5169, and wherein when the cancer index for the individual is less than about 0.051 the individual is classified as not having CIN3 and/or cancer or as having a low risk of CIN3 and/or cancer development, and wherein the sensitivity of the assay is at least 75.00% and the specificity of the assay is at least 75.00%, preferably wherein the panel of one or more CpGs comprises at least three CpG from DMR 169, and more preferably wherein the cancer index value is the mean β-value for the CpGs denoted by [[CG]] in SEQ ID NO: 5169;
[1326] 339. CpGs whose cancer index value is determined are located within at least DMR 170 defined by SEQ ID NO: 5170, and wherein when the cancer index for the individual is about 0.035 or more the individual is classified as having CIN3 and/or cancer or as having a high risk of CIN3 and/or cancer development, and wherein the sensitivity of the assay is at least 75.00% and the specificity of the assay is at least 75.00%, preferably wherein the panel of one or more CpGs comprises at least two CpG from DMR 170, and more preferably wherein the cancer index value is the mean β-value for the CpGs denoted by [[CG]] in SEQ ID NO: 5170;
[1327] 340. CpGs whose cancer index value is determined are located within at least DMR 170 defined by SEQ ID NO: 5170, and wherein when the cancer index for the individual is less than about 0.035 the individual is classified as not having CIN3 and/or cancer or as having a low risk of CIN3 and/or cancer development, and wherein the sensitivity of the assay is at least 75.00% and the specificity of the assay is at least 75.00%, preferably wherein the panel of one or more CpGs comprises at least two CpG from DMR 170, and more preferably wherein the cancer index value is the mean β-value for the CpGs denoted by [[CG]] in SEQ ID NO: 5170;
[1328] 341. CpGs whose cancer index value is determined are located within at least DMR 171 defined by SEQ ID NO: 5171, and wherein when the cancer index for the individual is about 0.035 or more the individual is classified as having CIN3 and/or cancer or as having a high risk of CIN3 and/or cancer development, and wherein the sensitivity of the assay is at least 75.00% and the specificity of the assay is at least 75.00%, preferably wherein the panel of one or more CpGs comprises at least two CpG from DMR 171, and more preferably wherein the cancer index value is the mean β-value for the CpGs denoted by [[CG]] in SEQ ID NO: 5171;
[1329] 342. CpGs whose cancer index value is determined are located within at least DMR 171 defined by SEQ ID NO: 5171, and wherein when the cancer index for the individual is less than about 0.035 the individual is classified as not having CIN3 and/or cancer or as having a low risk of CIN3 and/or cancer development, and wherein the sensitivity of the assay is at least 75.00% and the specificity of the assay is at least 75.00%, preferably wherein the panel of one or more CpGs comprises at least two CpG from DMR 171, and more preferably wherein the cancer index value is the mean β-value for the CpGs denoted by [[CG]] in SEQ ID NO: 5171;
[1330] 343. CpGs whose cancer index value is determined are located within at least DMR 172 defined by SEQ ID NO: 5172, and wherein when the cancer index for the individual is about 0.051 or more the individual is classified as having CIN3 and/or cancer or as having a high risk of CIN3 and/or cancer development, and wherein the sensitivity of the assay is at least 75.00% and the specificity of the assay is at least 75.00%, preferably wherein the panel of one or more CpGs comprises at least three CpG from DMR 172, and more preferably wherein the cancer index value is the mean β-value for the CpGs denoted by [[CG]] in SEQ ID NO: 5172;
[1331] 344. CpGs whose cancer index value is determined are located within at least DMR 172 defined by SEQ ID NO: 5172, and wherein when the cancer index for the individual is less than about 0.051 the individual is classified as not having CIN3 and/or cancer or as having a low risk of CIN3 and/or cancer development, and wherein the sensitivity of the assay is at least 75.00% and the specificity of the assay is at least 75.00%, preferably wherein the panel of one or more CpGs comprises at least three CpG from DMR 172, and more preferably wherein the cancer index value is the mean β-value for the CpGs denoted by [[CG]] in SEQ ID NO: 5172;
[1332] 345. CpGs whose cancer index value is determined are located within at least DMR 173 defined by SEQ ID NO: 5173, and wherein when the cancer index for the individual is about 0.042 or more the individual is classified as having CIN3 and/or cancer or as having a high risk of CIN3 and/or cancer development, and wherein the sensitivity of the assay is at least 71.00% and the specificity of the assay is at least 75.00%, preferably wherein the panel of one or more CpGs comprises at least ten CpG from DMR 173, and more preferably wherein the cancer index value is the mean β-value for the CpGs denoted by [[CG]] in SEQ ID NO: 5173;
[1333] 346. CpGs whose cancer index value is determined are located within at least DMR 173 defined by SEQ ID NO: 5173, and wherein when the cancer index for the individual is less than about 0.042 the individual is classified as not having CIN3 and/or cancer or as having a low risk of CIN3 and/or cancer development, and wherein the sensitivity of the assay is at least 71.00% and the specificity of the assay is at least 75.00%, preferably wherein the panel of one or more CpGs comprises at least ten CpG from DMR 173, and more preferably wherein the cancer index value is the mean β-value for the CpGs denoted by [[CG]] in SEQ ID NO: 5173;
[1334] 347. CpGs whose cancer index value is determined are located within at least DMR 174 defined by SEQ ID NO: 5174, and wherein when the cancer index for the individual is about 0.056 or more the individual is classified as having CIN3 and/or cancer or as having a high risk of CIN3 and/or cancer development, and wherein the sensitivity of the assay is at least 77.00% and the specificity of the assay is at least 75.00%, preferably wherein the panel of one or more CpGs comprises at least four CpG from DMR 174, and more preferably wherein the cancer index value is the mean β-value for the CpGs denoted by [[CG]] in SEQ ID NO: 5174;
[1335] 348. CpGs whose cancer index value is determined are located within at least DMR 174 defined by SEQ ID NO: 5174, and wherein when the cancer index for the individual is less than about 0.056 the individual is classified as not having CIN3 and/or cancer or as having a low risk of CIN3 and/or cancer development, and wherein the sensitivity of the assay is at least 77.00% and the specificity of the assay is at least 75.00%, preferably wherein the panel of one or more CpGs comprises at least four CpG from DMR 174, and more preferably wherein the cancer index value is the mean β-value for the CpGs denoted by [[CG]] in SEQ ID NO: 5174;
[1336] 349. CpGs whose cancer index value is determined are located within at least DMR 175 defined by SEQ ID NO: 5175, and wherein when the cancer index for the individual is about 0.059 or more the individual is classified as having CIN3 and/or cancer or as having a high risk of CIN3 and/or cancer development, and wherein the sensitivity of the assay is at least 72.00% and the specificity of the assay is at least 75.00%, preferably wherein the panel of one or more CpGs comprises at least six CpG from DMR 175, and more preferably wherein the cancer index value is the mean β-value for the CpGs denoted by [[CG]] in SEQ ID NO: 5175;
[1337] 350. CpGs whose cancer index value is determined are located within at least DMR 175 defined by SEQ ID NO: 5175, and wherein when the cancer index for the individual is less than about 0.059 the individual is classified as not having CIN3 and/or cancer or as having a low risk of CIN3 and/or cancer development, and wherein the sensitivity of the assay is at least 72.00% and the specificity of the assay is at least 75.00%, preferably wherein the panel of one or more CpGs comprises at least six CpG from DMR 175, and more preferably wherein the cancer index value is the mean β-value for the CpGs denoted by [[CG]] in SEQ ID NO: 5175;
[1338] 351. CpGs whose cancer index value is determined are located within at least DMR 176 defined by SEQ ID NO: 5176, and wherein when the cancer index for the individual is about 0.059 or more the individual is classified as having CIN3 and/or cancer or as having a high risk of CIN3 and/or cancer development, and wherein the sensitivity of the assay is at least 72.00% and the specificity of the assay is at least 75.00%, preferably wherein the panel of one or more CpGs comprises at least six CpG from DMR 176, and more preferably wherein the cancer index value is the mean β-value for the CpGs denoted by [[CG]] in SEQ ID NO: 5176;
[1339] 352. CpGs whose cancer index value is determined are located within at least DMR 176 defined by SEQ ID NO: 5176, and wherein when the cancer index for the individual is less than about 0.059 the individual is classified as not having CIN3 and/or cancer or as having a low risk of CIN3 and/or cancer development, and wherein the sensitivity of the assay is at least 72.00% and the specificity of the assay is at least 75.00%, DMR 176, and more preferably wherein the cancer index value is the mean β-value for the CpGs denoted by [[CG]] in SEQ ID NO: 5176;
[1340] 353. CpGs whose cancer index value is determined are located within at least DMR 177 defined by SEQ ID NO: 5177, and wherein when the cancer index for the individual is about 0.059 or more the individual is classified as having CIN3 and/or cancer or as having a high risk of CIN3 and/or cancer development, and wherein the sensitivity of the assay is at least 72.00% and the specificity of the assay is at least 75.00%, preferably wherein the panel of one or more CpGs comprises at least six CpG from DMR 177, and more preferably wherein the cancer index value is the mean β-value for the CpGs denoted by [[CG]] in SEQ ID NO: 5177;
[1341] 354. CpGs whose cancer index value is determined are located within at least DMR 177 defined by SEQ ID NO: 5177, and wherein when the cancer index for the individual is less than about 0.059 the individual is classified as not having CIN3 and/or cancer or as having a low risk of CIN3 and/or cancer development, and wherein the sensitivity of the assay is at least 72.00% and the specificity of the assay is at least 75.00%, preferably wherein the panel of one or more CpGs comprises at least six CpG from DMR 177, and more preferably wherein the cancer index value is the mean β-value for the CpGs denoted by [[CG]] in SEQ ID NO: 5177;
[1342] 355. CpGs whose cancer index value is determined are located within at least DMR 178 defined by SEQ ID NO: 5178, and wherein when the cancer index for the individual is about 0.021 or more the individual is classified as having CIN3 and/or cancer or as having a high risk of CIN3 and/or cancer development, and wherein the sensitivity of the assay is at least 68.00% and the specificity of the assay is at least 75.00%, preferably wherein the panel of one or more CpGs comprises at least two CpG from DMR 178, and more preferably wherein the cancer index value is the mean β-value for the CpGs denoted by [[CG]] in SEQ ID NO: 5178;
[1343] 356. CpGs whose cancer index value is determined are located within at least DMR 178 defined by SEQ ID NO: 5178, and wherein when the cancer index for the individual is less than about 0.021 the individual is classified as not having CIN3 and/or cancer or as having a low risk of CIN3 and/or cancer development, and wherein the sensitivity of the assay is at least 68.00% and the specificity of the assay is at least 75.00%, preferably wherein the panel of one or more CpGs comprises at least two CpG from DMR 178, and more preferably wherein the cancer index value is the mean β-value for the CpGs denoted by [[CG]] in SEQ ID NO: 5178;
[1344] 357. CpGs whose cancer index value is determined are located within at least DMR 179 defined by SEQ ID NO: 5179, and wherein when the cancer index for the individual is about 0.059 or more the individual is classified as having CIN3 and/or cancer or as having a high risk of CIN3 and/or cancer development, and wherein the sensitivity of the assay is at least 72.00% and the specificity of the assay is at least 75.00%, preferably wherein the panel of one or more CpGs comprises at least six CpG from DMR 179, and more preferably wherein the cancer index value is the mean β-value for the CpGs denoted by [[CG]] in SEQ ID NO: 5179;
[1345] 358. CpGs whose cancer index value is determined are located within at least DMR 179 defined by SEQ ID NO: 5179, and wherein when the cancer index for the individual is less than about 0.059 the individual is classified as not having CIN3 and/or cancer or as having a low risk of CIN3 and/or cancer development, and wherein the sensitivity of the assay is at least 72.00% and the specificity of the assay is at least 75.00%, preferably wherein the panel of one or more CpGs comprises at least six CpG from DMR 179, and more preferably wherein the cancer index value is the mean β-value for the CpGs denoted by [[CG]] in SEQ ID NO: 5179;
[1346] 359. CpGs whose cancer index value is determined are located within at least DMR 180 defined by SEQ ID NO: 5180, and wherein when the cancer index for the individual is about 0.07 or more the individual is classified as having CIN3 and/or cancer or as having a high risk of CIN3 and/or cancer development, and wherein the sensitivity of the assay is at least 75.00% and the specificity of the assay is at least 75.00%, preferably wherein the panel of one or more CpGs comprises at least seven CpG from DMR 180, and more preferably wherein the cancer index value is the mean β-value for the CpGs denoted by [[CG]] in SEQ ID NO: 5180;
[1347] 360. CpGs whose cancer index value is determined are located within at least DMR 180 defined by SEQ ID NO: 5180, and wherein when the cancer index for the individual is less than about 0.07 the individual is classified as not having CIN3 and/or cancer or as having a low risk of CIN3 and/or cancer development, and wherein the sensitivity of the assay is at least 75.00% and the specificity of the assay is at least 75.00%, preferably wherein the panel of one or more CpGs comprises at least seven CpG from DMR 180, and more preferably wherein the cancer index value is the mean β-value for the CpGs denoted by [[CG]] in SEQ ID NO: 5180;
[1348] 361. CpGs whose cancer index value is determined are located within at least DMR 181 defined by SEQ ID NO: 5181, and wherein when the cancer index for the individual is about 0.04 or more the individual is classified as having CIN3 and/or cancer or as having a high risk of CIN3 and/or cancer development, and wherein the sensitivity of the assay is at least 76.00% and the specificity of the assay is at least 75.00%, preferably wherein the panel of one or more CpGs comprises at least three CpG from DMR 181, and more preferably wherein the cancer index value is the mean β-value for the CpGs denoted by [[CG]] in SEQ ID NO: 5181;
[1349] 362. CpGs whose cancer index value is determined are located within at least DMR 181 defined by SEQ ID NO: 5181, and wherein when the cancer index for the individual is less than about 0.04 the individual is classified as not having CIN3 and/or cancer or as having a low risk of CIN3 and/or cancer development, and wherein the sensitivity of the assay is at least 76.00% and the specificity of the assay is at least 75.00%, preferably wherein the panel of one or more CpGs comprises at least three CpG from DMR 181, and more preferably wherein the cancer index value is the mean β-value for the CpGs denoted by [[CG]] in SEQ ID NO: 5181;
[1350] 363. CpGs whose cancer index value is determined are located within at least DMR 182 defined by SEQ ID NO: 5182, and wherein when the cancer index for the individual is about 0.042 or more the individual is classified as having CIN3 and/or cancer or as having a high risk of CIN3 and/or cancer development, and wherein the sensitivity of the assay is at least 70.00% and the specificity of the assay is at least 75.00%, preferably wherein the panel of one or more CpGs comprises at least six CpG from DMR 182, and more preferably wherein the cancer index value is the mean β-value for the CpGs denoted by [[CG]] in SEQ ID NO: 5182;
[1351] 364. CpGs whose cancer index value is determined are located within at least DMR 182 defined by SEQ ID NO: 5182, and wherein when the cancer index for the individual is less than about 0.042 the individual is classified as not having CIN3 and/or cancer or as having a low risk of CIN3 and/or cancer development, and wherein the sensitivity of the assay is at least 70.00% and the specificity of the assay is at least 75.00%, preferably wherein the panel of one or more CpGs comprises at least six CpG from DMR 182, and more preferably wherein the cancer index value is the mean β-value for the CpGs denoted by [[CG]] in SEQ ID NO: 5182;
[1352] 365. CpGs whose cancer index value is determined are located within at least DMR 183 defined by SEQ ID NO: 5183, and wherein when the cancer index for the individual is about 0.038 or more the individual is classified as having CIN3 and/or cancer or as having a high risk of CIN3 and/or cancer development, and wherein the sensitivity of the assay is at least 76.00% and the specificity of the assay is at least 75.00%, preferably wherein the panel of one or more CpGs comprises at least six CpG from DMR 183, and more preferably wherein the cancer index value is the mean β-value for the CpGs denoted by [[CG]] in SEQ ID NO: 5183;
[1353] 366. CpGs whose cancer index value is determined are located within at least DMR 183 defined by SEQ ID NO: 5183, and wherein when the cancer index for the individual is less than about 0.038 the individual is classified as not having CIN3 and/or cancer or as having a low risk of CIN3 and/or cancer development, and wherein the sensitivity of preferably wherein the panel of one or more CpGs comprises at least six CpG from DMR 183, and more preferably wherein the cancer index value is the mean β-value for the CpGs denoted by [[CG]] in SEQ ID NO: 5183;
[1354] 367. CpGs whose cancer index value is determined are located within at least DMR 184 defined by SEQ ID NO: 5184, and wherein when the cancer index for the individual is about 0.042 or more the individual is classified as having CIN3 and/or cancer or as having a high risk of CIN3 and/or cancer development, and wherein the sensitivity of the assay is at least 70.00% and the specificity of the assay is at least 75.00%, preferably wherein the panel of one or more CpGs comprises at least six CpG from DMR 184, and more preferably wherein the cancer index value is the mean β-value for the CpGs denoted by [[CG]] in SEQ ID NO: 5184;
[1355] 368. CpGs whose cancer index value is determined are located within at least DMR 184 defined by SEQ ID NO: 5184, and wherein when the cancer index for the individual is less than about 0.042 the individual is classified as not having CIN3 and/or cancer or as having a low risk of CIN3 and/or cancer development, and wherein the sensitivity of the assay is at least 70.00% and the specificity of the assay is at least 75.00%, preferably wherein the panel of one or more CpGs comprises at least six CpG from DMR 184, and more preferably wherein the cancer index value is the mean β-value for the CpGs denoted by [[CG]] in SEQ ID NO: 5184;
[1356] 369. CpGs whose cancer index value is determined are located within at least DMR 185 defined by SEQ ID NO: 5185, and wherein when the cancer index for the individual is about 0.07 or more the individual is classified as having CIN3 and/or cancer or as having a high risk of CIN3 and/or cancer development, and wherein the sensitivity of the assay is at least 75.00% and the specificity of the assay is at least 75.00%, preferably wherein the panel of one or more CpGs comprises at least seven CpG from DMR 185, and more preferably wherein the cancer index value is the mean β-value for the CpGs denoted by [[CG]] in SEQ ID NO: 5185;
[1357] 370. CpGs whose cancer index value is determined are located within at least DMR 185 defined by SEQ ID NO: 5185, and wherein when the cancer index for the individual is less than about 0.07 the individual is classified as not having CIN3 and/or cancer or as having a low risk of CIN3 and/or cancer development, and wherein the sensitivity of the assay is at least 75.00% and the specificity of the assay is at least 75.00%, preferably wherein the panel of one or more CpGs comprises at least seven CpG from DMR 185, and more preferably wherein the cancer index value is the mean β-value for the CpGs denoted by [[CG]] in SEQ ID NO: 5185;
[1358] 371. CpGs whose cancer index value is determined are located within at least DMR 186 defined by SEQ ID NO: 5186, and wherein when the cancer index for the individual is about 0.04 or more the individual is classified as having CIN3 and/or cancer or as having a high risk of CIN3 and/or cancer development, and wherein the sensitivity of the assay is at least 76.00% and the specificity of the assay is at least 75.00%, preferably wherein the panel of one or more CpGs comprises at least three CpG from DMR 186, and more preferably wherein the cancer index value is the mean β-value for the CpGs denoted by [[CG]] in SEQ ID NO: 5186;
[1359] 372. CpGs whose cancer index value is determined are located within at least DMR 186 defined by SEQ ID NO: 5186, and wherein when the cancer index for the individual is less than about 0.04 the individual is classified as not having CIN3 and/or cancer or as having a low risk of CIN3 and/or cancer development, and wherein the sensitivity of the assay is at least 76.00% and the specificity of the assay is at least 75.00%, preferably wherein the panel of one or more CpGs comprises at least three CpG from DMR 186, and more preferably wherein the cancer index value is the mean β-value for the CpGs denoted by [[CG]] in SEQ ID NO: 5186;
[1360] 373. CpGs whose cancer index value is determined are located within at least DMR 187 defined by SEQ ID NO: 5187, and wherein when the cancer index for the individual is about 0.04 or more the individual is classified as having CIN3 and/or cancer or as having a high risk of CIN3 and/or cancer development, and wherein the sensitivity of the assay is at least 76.00% and the specificity of the assay is at least 75.00%, preferably wherein the panel of one or more CpGs comprises at least three CpG from DMR 187, and more preferably wherein the cancer index value is the mean β-value for the CpGs denoted by [[CG]] in SEQ ID NO: 5187;
[1361] 374. CpGs whose cancer index value is determined are located within at least DMR 187 defined by SEQ ID NO: 5187, and wherein when the cancer index for the individual is less than about 0.04 the individual is classified as not having CIN3 and/or cancer or as having a low risk of CIN3 and/or cancer development, and wherein the sensitivity of the assay is at least 76.00% and the specificity of the assay is at least 75.00%, preferably wherein the panel of one or more CpGs comprises at least three CpG from DMR 187, and more preferably wherein the cancer index value is the mean β-value for the CpGs denoted by [[CG]] in SEQ ID NO: 5187;
[1362] 375. CpGs whose cancer index value is determined are located within at least DMR 188 defined by SEQ ID NO: 5188, and wherein when the cancer index for the individual is about 0.078 or more the individual is classified as having CIN3 and/or cancer or as having a high risk of CIN3 and/or cancer development, and wherein the sensitivity of the assay is at least 75.00% and the specificity of the assay is at least 75.00%, DMR 188, and more preferably wherein the cancer index value is the mean β-value for the CpGs denoted by [[CG]] in SEQ ID NO: 5188;
[1363] 376. CpGs whose cancer index value is determined are located within at least DMR 188 defined by SEQ ID NO: 5188, and wherein when the cancer index for the individual is less than about 0.078 the individual is classified as not having CIN3 and/or cancer or as having a low risk of CIN3 and/or cancer development, and wherein the sensitivity of the assay is at least 75.00% and the specificity of the assay is at least 75.00%, preferably wherein the panel of one or more CpGs comprises at least five CpG from DMR 188, and more preferably wherein the cancer index value is the mean β-value for the CpGs denoted by [[CG]] in SEQ ID NO: 5188;
[1364] 377. CpGs whose cancer index value is determined are located within at least DMR 189 defined by SEQ ID NO: 5189, and wherein when the cancer index for the individual is about 0.038 or more the individual is classified as having CIN3 and/or cancer or as having a high risk of CIN3 and/or cancer development, and wherein the sensitivity of the assay is at least 76.00% and the specificity of the assay is at least 75.00%, preferably wherein the panel of one or more CpGs comprises at least six CpG from DMR 189, and more preferably wherein the cancer index value is the mean β-value for the CpGs denoted by [[CG]] in SEQ ID NO: 5189;
[1365] 378. CpGs whose cancer index value is determined are located within at least DMR 189 defined by SEQ ID NO: 5189, and wherein when the cancer index for the individual is less than about 0.038 the individual is classified as not having CIN3 and/or cancer or as having a low risk of CIN3 and/or cancer development, and wherein the sensitivity of the assay is at least 76.00% and the specificity of the assay is at least 75.00%, preferably wherein the panel of one or more CpGs comprises at least six CpG from DMR 189, and more preferably wherein the cancer index value is the mean β-value for the CpGs denoted by [[CG]] in SEQ ID NO: 5189;
[1366] 379. CpGs whose cancer index value is determined are located within at least DMR 190 defined by SEQ ID NO: 5190, and wherein when the cancer index for the individual is about 0.019 or more the individual is classified as having CIN3 and/or cancer or as having a high risk of CIN3 and/or cancer development, and wherein the sensitivity of the assay is at least 75.00% and the specificity of the assay is at least 75.00%, preferably wherein the panel of one or more CpGs comprises at least one CpG from DMR 190, and more preferably wherein the cancer index value is the mean β-value for the CpGs denoted by [[CG]] in SEQ ID NO: 5190;
[1367] 380. CpGs whose cancer index value is determined are located within at least DMR 190 defined by SEQ ID NO: 5190, and wherein when the cancer index for the individual is less than about 0.019 the individual is classified as not having CIN3 and/or cancer or as having a low risk of CIN3 and/or cancer development, and wherein the sensitivity of the assay is at least 75.00% and the specificity of the assay is at least 75.00%, preferably wherein the panel of one or more CpGs comprises at least one CpG from DMR 190, and more preferably wherein the cancer index value is the mean β-value for the CpGs denoted by [[CG]] in SEQ ID NO: 5190;
[1368] 381. CpGs whose cancer index value is determined are located within at least DMR 191 defined by SEQ ID NO: 5191, and wherein when the cancer index for the individual is about 0.037 or more the individual is classified as having CIN3 and/or cancer or as having a high risk of CIN3 and/or cancer development, and wherein the sensitivity of the assay is at least 75.00% and the specificity of the assay is at least 75.00%, preferably wherein the panel of one or more CpGs comprises at least seven CpG from DMR 191, and more preferably wherein the cancer index value is the mean β-value for the CpGs denoted by [[CG]] in SEQ ID NO: 5191;
[1369] 382. CpGs whose cancer index value is determined are located within at least DMR 191 defined by SEQ ID NO: 5191, and wherein when the cancer index for the individual is less than about 0.037 the individual is classified as not having CIN3 and/or cancer or as having a low risk of CIN3 and/or cancer development, and wherein the sensitivity of the assay is at least 75.00% and the specificity of the assay is at least 75.00%, preferably wherein the panel of one or more CpGs comprises at least seven CpG from DMR 191, and more preferably wherein the cancer index value is the mean β-value for the CpGs denoted by [[CG]] in SEQ ID NO: 5191;
[1370] 383. CpGs whose cancer index value is determined are located within at least DMR 192 defined by SEQ ID NO: 5192, and wherein when the cancer index for the individual is about 0.037 or more the individual is classified as having CIN3 and/or cancer or as having a high risk of CIN3 and/or cancer development, and wherein the sensitivity of the assay is at least 75.00% and the specificity of the assay is at least 75.00%, preferably wherein the panel of one or more CpGs comprises at least seven CpG from DMR 192, and more preferably wherein the cancer index value is the mean β-value for the CpGs denoted by [[CG]] in SEQ ID NO: 5192;
[1371] 384. CpGs whose cancer index value is determined are located within at least DMR 192 defined by SEQ ID NO: 5192, and wherein when the cancer index for the individual is less than about 0.037 the individual is classified as not having CIN3 and/or cancer or as having a low risk of CIN3 and/or cancer development, and wherein the sensitivity of the assay is at least 75.00% and the specificity of the assay is at least 75.00%, preferably wherein the panel of one or more CpGs comprises at least seven CpG from DMR 192, and more preferably wherein the cancer index value is the mean β-value for the CpGs denoted by [[CG]] in SEQ ID NO: 5192;
[1372] 385. CpGs whose cancer index value is determined are located within at least DMR 193 defined by SEQ ID NO: 5193, and wherein when the cancer index for the individual is about 0.029 or more the individual is classified as having CIN3 and/or cancer or as having a high risk of CIN3 and/or cancer development, and wherein the sensitivity of the assay is at least 72.00% and the specificity of the assay is at least 75.00%, preferably wherein the panel of one or more CpGs comprises at least four CpG from DMR 193, and more preferably wherein the cancer index value is the mean β-value for the CpGs denoted by [[CG]] in SEQ ID NO: 5193;
[1373] 386. CpGs whose cancer index value is determined are located within at least DMR 193 defined by SEQ ID NO: 5193, and wherein when the cancer index for the individual is less than about 0.029 the individual is classified as not having CIN3 and/or cancer or as having a low risk of CIN3 and/or cancer development, and wherein the sensitivity of the assay is at least 72.00% and the specificity of the assay is at least 75.00%, preferably wherein the panel of one or more CpGs comprises at least four CpG from DMR 193, and more preferably wherein the cancer index value is the mean β-value for the CpGs denoted by [[CG]] in SEQ ID NO: 5193;
[1374] 387. CpGs whose cancer index value is determined are located within at least DMR 194 defined by SEQ ID NO: 5194, and wherein when the cancer index for the individual is about 0.054 or more the individual is classified as having CIN3 and/or cancer or as having a high risk of CIN3 and/or cancer development, and wherein the sensitivity of the assay is at least 77.00% and the specificity of the assay is at least 75.00%, preferably wherein the panel of one or more CpGs comprises at least two CpG from DMR 194, and more preferably wherein the cancer index value is the mean β-value for the CpGs denoted by [[CG]] in SEQ ID NO: 5194;
[1375] 388. CpGs whose cancer index value is determined are located within at least DMR 194 defined by SEQ ID NO: 5194, and wherein when the cancer index for the individual is less than about 0.054 the individual is classified as not having CIN3 and/or cancer or as having a low risk of CIN3 and/or cancer development, and wherein the sensitivity of the assay is at least 77.00% and the specificity of the assay is at least 75.00%, preferably wherein the panel of one or more CpGs comprises at least two CpG from DMR 194, and more preferably wherein the cancer index value is the mean β-value for the CpGs denoted by [[CG]] in SEQ ID NO: 5194;
[1376] 389. CpGs whose cancer index value is determined are located within at least DMR 195 defined by SEQ ID NO: 5195, and wherein when the cancer index for the individual is about 0.031 or more the individual is classified as having CIN3 and/or cancer or as having a high risk of CIN3 and/or cancer development, and wherein the sensitivity of the assay is at least 74.00% and the specificity of the assay is at least 75.00%, preferably wherein the panel of one or more CpGs comprises at least three CpG from DMR 195, and more preferably wherein the cancer index value is the mean β-value for the CpGs denoted by [[CG]] in SEQ ID NO: 5195;
[1377] 390. CpGs whose cancer index value is determined are located within at least DMR 195 defined by SEQ ID NO: 5195, and wherein when the cancer index for the individual is less than about 0.031 the individual is classified as not having CIN3 and/or cancer or as having a low risk of CIN3 and/or cancer development, and wherein the sensitivity of the assay is at least 74.00% and the specificity of the assay is at least 75.00%, preferably wherein the panel of one or more CpGs comprises at least three CpG from DMR 195, and more preferably wherein the cancer index value is the mean β-value for the CpGs denoted by [[CG]] in SEQ ID NO: 5195;
[1378] 391. CpGs whose cancer index value is determined are located within at least DMR 196 defined by SEQ ID NO: 5196, and wherein when the cancer index for the individual is about 0.024 or more the individual is classified as having CIN3 and/or cancer or as having a high risk of CIN3 and/or cancer development, and wherein the sensitivity of the assay is at least 71.00% and the specificity of the assay is at least 75.00%, preferably wherein the panel of one or more CpGs comprises at least nine CpG from DMR 196, and more preferably wherein the cancer index value is the mean β-value for the CpGs denoted by [[CG]] in SEQ ID NO: 5196;
[1379] 392. CpGs whose cancer index value is determined are located within at least DMR 196 defined by SEQ ID NO: 5196, and wherein when the cancer index for the individual is less than about 0.024 the individual is classified as not having CIN3 and/or cancer or as having a low risk of CIN3 and/or cancer development, and wherein the sensitivity of the assay is at least 71.00% and the specificity of the assay is at least 75.00%, preferably wherein the panel of one or more CpGs comprises at least nine CpG from DMR 196, and more preferably wherein the cancer index value is the mean β-value for the CpGs denoted by [[CG]] in SEQ ID NO: 5196;
[1380] 393. CpGs whose cancer index value is determined are located within at least DMR 197 defined by SEQ ID NO: 5197, and wherein when the cancer index for the individual is about 0.03 or more the individual is classified as having CIN3 and/or cancer or as having a high risk of CIN3 and/or cancer development, and wherein the sensitivity of the assay is at least 71.00% and the specificity of the assay is at least 75.00%, preferably wherein the panel of one or more CpGs comprises at least eight CpG from DMR 197, and more preferably wherein the cancer index value is the mean β-value for the CpGs denoted by [[CG]] in SEQ ID NO: 5197;
[1381] 394. CpGs whose cancer index value is determined are located within at least DMR 197 defined by SEQ ID NO: 5197, and wherein when the cancer index for the individual is less than about 0.03 the individual is classified as not having CIN3 and/or cancer or as having a low risk of CIN3 and/or cancer development, and wherein the sensitivity of the assay is at least 71.00% and the specificity of the assay is at least 75.00%, preferably wherein the panel of one or more CpGs comprises at least eight CpG from DMR 197, and more preferably wherein the cancer index value is the mean β-value for the CpGs denoted by [[CG]] in SEQ ID NO: 5197;
[1382] 395. CpGs whose cancer index value is determined are located within at least DMR 198 defined by SEQ ID NO: 5198, and wherein when the cancer index for the individual is about 0.024 or more the individual is classified as having CIN3 and/or cancer or as having a high risk of CIN3 and/or cancer development, and wherein the sensitivity of the assay is at least 71.00% and the specificity of the assay is at least 75.00%, preferably wherein the panel of one or more CpGs comprises at least nine CpG from DMR 198, and more preferably wherein the cancer index value is the mean β-value for the CpGs denoted by [[CG]] in SEQ ID NO: 5198;
[1383] 396. CpGs whose cancer index value is determined are located within at least DMR 198 defined by SEQ ID NO: 5198, and wherein when the cancer index for the individual is less than about 0.024 the individual is classified as not having CIN3 and/or cancer or as having a low risk of CIN3 and/or cancer development, and wherein the sensitivity of the assay is at least 71.00% and the specificity of the assay is at least 75.00%, preferably wherein the panel of one or more CpGs comprises at least nine CpG from DMR 198, and more preferably wherein the cancer index value is the mean β-value for the CpGs denoted by [[CG]] in SEQ ID NO: 5198;
[1384] 397. CpGs whose cancer index value is determined are located within at least DMR 199 defined by SEQ ID NO: 5199, and wherein when the cancer index for the individual is about 0.03 or more the individual is classified as having CIN3 and/or cancer or as having a high risk of CIN3 and/or cancer development, and wherein the sensitivity of the assay is at least 71.00% and the specificity of the assay is at least 75.00%, preferably wherein the panel of one or more CpGs comprises at least eight CpG from DMR 199, and more preferably wherein the cancer index value is the mean β-value for the CpGs denoted by [[CG]] in SEQ ID NO: 5199;
[1385] 398. CpGs whose cancer index value is determined are located within at least DMR 199 defined by SEQ ID NO: 5199, and wherein when the cancer index for the individual is less than about 0.03 the individual is classified as not having CIN3 and/or cancer or as having a low risk of CIN3 and/or cancer development, and wherein the sensitivity of the assay is at least 71.00% and the specificity of the assay is at least 75.00%, preferably wherein the panel of one or more CpGs comprises at least eight CpG from DMR 199, and more preferably wherein the cancer index value is the mean β-value for the CpGs denoted by [[CG]] in SEQ ID NO: 5199;
[1386] 399. CpGs whose cancer index value is determined are located within at least DMR 200 defined by SEQ ID NO: 5200, and wherein when the cancer index for the individual is about 0.031 or more the individual is classified as having CIN3 and/or cancer or as having a high risk of CIN3 and/or cancer development, and wherein the sensitivity of the assay is at least 74.00% and the specificity of the assay is at least 75.00%, preferably wherein the panel of one or more CpGs comprises at least three CpG from DMR 200, and more preferably wherein the cancer index value is the mean β-value for the CpGs denoted by [[CG]] in SEQ ID NO: 5200;
[1387] 400. CpGs whose cancer index value is determined are located within at least DMR 200 defined by SEQ ID NO: 5200, and wherein when the cancer index for the individual is less than about 0.031 the individual is classified as not having CIN3 and/or cancer or as having a low risk of CIN3 and/or cancer development, and wherein the sensitivity of the assay is at least 74.00% and the specificity of the assay is at least 75.00%, preferably wherein the panel of one or more CpGs comprises at least three CpG from DMR 200, and more preferably wherein the cancer index value is the mean β-value for the CpGs denoted by [[CG]] in SEQ ID NO: 5200;
[1388] 401. CpGs whose cancer index value is determined are located within at least DMR 201 defined by SEQ ID NO: 5201, and wherein when the cancer index for the individual is about 0.031 or more the individual is classified as having CIN3 and/or cancer or as having a high risk of CIN3 and/or cancer development, and wherein the sensitivity of the assay is at least 74.00% and the specificity of the assay is at least 75.00%, preferably wherein the panel of one or more CpGs comprises at least three CpG from DMR 201, and more preferably wherein the cancer index value is the mean β-value for the CpGs denoted by [[CG]] in SEQ ID NO: 5201;
[1389] 402. CpGs whose cancer index value is determined are located within at least DMR 201 defined by SEQ ID NO: 5201, and wherein when the cancer index for the individual is less than about 0.031 the individual is classified as not having CIN3 and/or cancer or as having a low risk of CIN3 and/or cancer development, and wherein the sensitivity of the assay is at least 74.00% and the specificity of the assay is at least 75.00%, preferably wherein the panel of one or more CpGs comprises at least three CpG from DMR 201, and more preferably wherein the cancer index value is the mean β-value for the CpGs denoted by [[CG]] in SEQ ID NO: 5201;
[1390] 403. CpGs whose cancer index value is determined are located within at least DMR 202 defined by SEQ ID NO: 5202, and wherein when the cancer index for the individual is about 0.054 or more the individual is classified as having CIN3 and/or cancer or as having a high risk of CIN3 and/or cancer development, and wherein the sensitivity of the assay is at least 77.00% and the specificity of the assay is at least 75.00%, preferably wherein the panel of one or more CpGs comprises at least two CpG from DMR 202, and more preferably wherein the cancer index value is the mean β-value for the CpGs denoted by [[CG]] in SEQ ID NO: 5202;
[1391] 404. CpGs whose cancer index value is determined are located within at least DMR 202 defined by SEQ ID NO: 5202, and wherein when the cancer index for the individual is less than about 0.054 the individual is classified as not having CIN3 and/or cancer or as having a low risk of CIN3 and/or cancer development, and wherein the sensitivity of the assay is at least 77.00% and the specificity of the assay is at least 75.00%, preferably wherein the panel of one or more CpGs comprises at least two CpG from DMR 202, and more preferably wherein the cancer index value is the mean β-value for the CpGs denoted by [[CG]] in SEQ ID NO: 5202;
[1392] 405. CpGs whose cancer index value is determined are located within at least DMR 203 defined by SEQ ID NO: 5203, and wherein when the cancer index for the individual is about 0.03 or more the individual is classified as having CIN3 and/or cancer or as having a high risk of CIN3 and/or cancer development, and wherein the sensitivity of the assay is at least 71.00% and the specificity of the assay is at least 75.00%, preferably wherein the panel of one or more CpGs comprises at least eight CpG from DMR 203, and more preferably wherein the cancer index value is the mean β-value for the CpGs denoted by [[CG]] in SEQ ID NO: 5203;
[1393] 406. CpGs whose cancer index value is determined are located within at least DMR 203 defined by SEQ ID NO: 5203, and wherein when the cancer index for the individual is less than about 0.03 the individual is classified as not having CIN3 and/or cancer or as having a low risk of CIN3 and/or cancer development, and wherein the sensitivity of the assay is at least 71.00% and the specificity of the assay is at least 75.00%, preferably wherein the panel of one or more CpGs comprises at least eight CpG from DMR 203, and more preferably wherein the cancer index value is the mean β-value for the CpGs denoted by [[CG]] in SEQ ID NO: 5203;
[1394] 407. CpGs whose cancer index value is determined are located within at least DMR 204 defined by SEQ ID NO: 5204, and wherein when the cancer index for the individual is about 0.026 or more the individual is classified as having CIN3 and/or cancer or as having a high risk of CIN3 and/or cancer development, and wherein the sensitivity of the assay is at least 70.00% and the specificity of the assay is at least 75.00%, preferably wherein the panel of one or more CpGs comprises at least six CpG from DMR 204, and more preferably wherein the cancer index value is the mean β-value for the CpGs denoted by [[CG]] in SEQ ID NO: 5204;
[1395] 408. CpGs whose cancer index value is determined are located within at least DMR 204 defined by SEQ ID NO: 5204, and wherein when the cancer index for the individual is less than about 0.026 the individual is classified as not having CIN3 and/or cancer or as having a low risk of CIN3 and/or cancer development, and wherein the sensitivity of the assay is at least 70.00% and the specificity of the assay is at least 75.00%, preferably wherein the panel of one or more CpGs comprises at least six CpG from DMR 204, and more preferably wherein the cancer index value is the mean β-value for the CpGs denoted by [[CG]] in SEQ ID NO: 5204;
[1396] 409. CpGs whose cancer index value is determined are located within at least DMR 205 defined by SEQ ID NO: 5205, and wherein when the cancer index for the individual is about 0.022 or more the individual is classified as having CIN3 and/or cancer or as having a high risk of CIN3 and/or cancer development, and wherein the sensitivity of the assay is at least 75.00% and the specificity of the assay is at least 75.00%, preferably wherein the panel of one or more CpGs comprises at least three CpG from DMR 205, and more preferably wherein the cancer index value is the mean β-value for the CpGs denoted by [[CG]] in SEQ ID NO: 5205;
[1397] 410. CpGs whose cancer index value is determined are located within at least DMR 205 defined by SEQ ID NO: 5205, and wherein when the cancer index for the individual is less than about 0.022 the individual is classified as not having CIN3 and/or cancer or as having a low risk of CIN3 and/or cancer development, and wherein the sensitivity of the assay is at least 75.00% and the specificity of the assay is at least 75.00%, preferably wherein the panel of one or more CpGs comprises at least three CpG from DMR 205, and more preferably wherein the cancer index value is the mean β-value for the CpGs denoted by [[CG]] in SEQ ID NO: 5205;
[1398] 411. CpGs whose cancer index value is determined are located within at least DMR 206 defined by SEQ ID NO: 5206, and wherein when the cancer index for the individual is about 0.032 or more the individual is classified as having CIN3 and/or cancer or as having a high risk of CIN3 and/or cancer development, and wherein the sensitivity of the assay is at least 72.00% and the specificity of the assay is at least 75.00%, preferably wherein the panel of one or more CpGs comprises at least nine CpG from DMR 206, and more preferably wherein the cancer index value is the mean β-value for the CpGs denoted by [[CG]] in SEQ ID NO: 5206;
[1399] 412. CpGs whose cancer index value is determined are located within at least DMR 206 defined by SEQ ID NO: 5206, and wherein when the cancer index for the individual is less than about 0.032 the individual is classified as not having CIN3 and/or cancer or as having a low risk of CIN3 and/or cancer development, and wherein the sensitivity of the assay is at least 72.00% and the specificity of the assay is at least 75.00%, preferably wherein the panel of one or more CpGs comprises at least nine CpG from DMR 206, and more preferably wherein the cancer index value is the mean β-value for the CpGs denoted by [[CG]] in SEQ ID NO: 5206;
[1400] 413. CpGs whose cancer index value is determined are located within at least DMR 207 defined by SEQ ID NO: 5207, and wherein when the cancer index for the individual is about 0.022 or more the individual is classified as having CIN3 and/or cancer or as having a high risk of CIN3 and/or cancer development, and wherein the sensitivity of the assay is at least 75.00% and the specificity of the assay is at least 75.00%, preferably wherein the panel of one or more CpGs comprises at least three CpG from DMR 207, and more preferably wherein the cancer index value is the mean β-value for the CpGs denoted by [[CG]] in SEQ ID NO: 5207;
[1401] 414. CpGs whose cancer index value is determined are located within at least DMR 207 defined by SEQ ID NO: 5207, and wherein when the cancer index for the individual is less than about 0.022 the individual is classified as not having CIN3 and/or cancer or as having a low risk of CIN3 and/or cancer development, and wherein the sensitivity of the assay is at least 75.00% and the specificity of the assay is at least 75.00%, preferably wherein the panel of one or more CpGs comprises at least three CpG from DMR 207, and more preferably wherein the cancer index value is the mean β-value for the CpGs denoted by [[CG]] in SEQ ID NO: 5207;
[1402] 415. CpGs whose cancer index value is determined are located within at least DMR 208 defined by SEQ ID NO: 5208, and wherein when the cancer index for the individual is about 0.032 or more the individual is classified as having CIN3 and/or cancer or as having a high risk of CIN3 and/or cancer development, and wherein the sensitivity of the assay is at least 72.00% and the specificity of the assay is at least 75.00%, preferably wherein the panel of one or more CpGs comprises at least nine CpG from DMR 208, and more preferably wherein the cancer index value is the mean β-value for the CpGs denoted by [[CG]] in SEQ ID NO: 5208;
[1403] 416. CpGs whose cancer index value is determined are located within at least DMR 208 defined by SEQ ID NO: 5208, and wherein when the cancer index for the individual is less than about 0.032 the individual is classified as not having CIN3 and/or cancer or as having a low risk of CIN3 and/or cancer development, and wherein the sensitivity of the assay is at least 72.00% and the specificity of the assay is at least 75.00%, preferably wherein the panel of one or more CpGs comprises at least nine CpG from DMR 208, and more preferably wherein the cancer index value is the mean β-value for the CpGs denoted by [[CG]] in SEQ ID NO: 5208;
[1404] 417. CpGs whose cancer index value is determined are located within at least DMR 209 defined by SEQ ID NO: 5209, and wherein when the cancer index for the individual is about 0.039 or more the individual is classified as having CIN3 and/or cancer or as having a high risk of CIN3 and/or cancer development, and wherein the sensitivity of the assay is at least 75.00% and the specificity of the assay is at least 75.00%, preferably wherein the panel of one or more CpGs comprises at least seven CpG from DMR 209, and more preferably wherein the cancer index value is the mean β-value for the CpGs denoted by [[CG]] in SEQ ID NO: 5209;
[1405] 418. CpGs whose cancer index value is determined are located within at least DMR 209 defined by SEQ ID NO: 5209, and wherein when the cancer index for the individual is less than about 0.039 the individual is classified as not having CIN3 and/or cancer or as having a low risk of CIN3 and/or cancer development, and wherein the sensitivity of the assay is at least 75.00% and the specificity of the assay is at least 75.00%, preferably wherein the panel of one or more CpGs comprises at least seven CpG from DMR 209, and more preferably wherein the cancer index value is the mean β-value for the CpGs denoted by [[CG]] in SEQ ID NO: 5209;
[1406] 419. CpGs whose cancer index value is determined are located within at least DMR 210 defined by SEQ ID NO: 5210, and wherein when the cancer index for the individual is about 0.036 or more the individual is classified as having CIN3 and/or cancer or as having a high risk of CIN3 and/or cancer development, and wherein the sensitivity of the assay is at least 74.00% and the specificity of the assay is at least 75.00%, preferably wherein the panel of one or more CpGs comprises at least five CpG from DMR 210, and more preferably wherein the cancer index value is the mean β-value for the CpGs denoted by [[CG]] in SEQ ID NO: 5210;
[1407] 420. CpGs whose cancer index value is determined are located within at least DMR 210 defined by SEQ ID NO: 5210, and wherein when the cancer index for the individual is less than about 0.036 the individual is classified as not having CIN3 and/or cancer or as having a low risk of CIN3 and/or cancer development, and wherein the sensitivity of the assay is at least 74.00% and the specificity of the assay is at least 75.00%, preferably wherein the panel of one or more CpGs comprises at least five CpG from DMR 210, and more preferably wherein the cancer index value is the mean β-value for the CpGs denoted by [[CG]] in SEQ ID NO: 5210;
[1408] 421. CpGs whose cancer index value is determined are located within at least DMR 211 defined by SEQ ID NO: 5211, and wherein when the cancer index for the individual is about 0.066 or more the individual is classified as having CIN3 and/or cancer or as having a high risk of CIN3 and/or cancer development, and wherein the sensitivity of the assay is at least 69.00% and the specificity of the assay is at least 75.00%, DMR 211, and more preferably wherein the cancer index value is the mean β-value for the CpGs denoted by [[CG]] in SEQ ID NO: 5211;
[1409] 422. CpGs whose cancer index value is determined are located within at least DMR 211 defined by SEQ ID NO: 5211, and wherein when the cancer index for the individual is less than about 0.066 the individual is classified as not having CIN3 and/or cancer or as having a low risk of CIN3 and/or cancer development, and wherein the sensitivity of the assay is at least 69.00% and the specificity of the assay is at least 75.00%, preferably wherein the panel of one or more CpGs comprises at least five CpG from DMR 211, and more preferably wherein the cancer index value is the mean β-value for the CpGs denoted by [[CG]] in SEQ ID NO: 5211;
[1410] 423. CpGs whose cancer index value is determined are located within at least DMR 212 defined by SEQ ID NO: 5212, and wherein when the cancer index for the individual is about 0.044 or more the individual is classified as having CIN3 and/or cancer or as having a high risk of CIN3 and/or cancer development, and wherein the sensitivity of the assay is at least 72.00% and the specificity of the assay is at least 75.00%, preferably wherein the panel of one or more CpGs comprises at least three CpG from DMR 212, and more preferably wherein the cancer index value is the mean β-value for the CpGs denoted by [[CG]] in SEQ ID NO: 5212;
[1411] 424. CpGs whose cancer index value is determined are located within at least DMR 212 defined by SEQ ID NO: 5212, and wherein when the cancer index for the individual is less than about 0.044 the individual is classified as not having CIN3 and/or cancer or as having a low risk of CIN3 and/or cancer development, and wherein the sensitivity of the assay is at least 72.00% and the specificity of the assay is at least 75.00%, preferably wherein the panel of one or more CpGs comprises at least three CpG from DMR 212, and more preferably wherein the cancer index value is the mean β-value for the CpGs denoted by [[CG]] in SEQ ID NO: 5212;
[1412] 425. CpGs whose cancer index value is determined are located within at least DMR 213 defined by SEQ ID NO: 5213, and wherein when the cancer index for the individual is about 0.044 or more the individual is classified as having CIN3 and/or cancer or as having a high risk of CIN3 and/or cancer development, and wherein the sensitivity of the assay is at least 72.00% and the specificity of the assay is at least 75.00%, preferably wherein the panel of one or more CpGs comprises at least three CpG from DMR 213, and more preferably wherein the cancer index value is the mean β-value for the CpGs denoted by [[CG]] in SEQ ID NO: 5213;
[1413] 426. CpGs whose cancer index value is determined are located within at least DMR 213 defined by SEQ ID NO: 5213, and wherein when the cancer index for the individual is less than about 0.044 the individual is classified as not having CIN3 and/or cancer or as having a low risk of CIN3 and/or cancer development, and wherein the sensitivity of the assay is at least 72.00% and the specificity of the assay is at least 75.00%, preferably wherein the panel of one or more CpGs comprises at least three CpG from DMR 213, and more preferably wherein the cancer index value is the mean β-value for the CpGs denoted by [[CG]] in SEQ ID NO: 5213;
[1414] 427. CpGs whose cancer index value is determined are located within at least DMR 214 defined by SEQ ID NO: 5214, and wherein when the cancer index for the individual is about 0.044 or more the individual is classified as having CIN3 and/or cancer or as having a high risk of CIN3 and/or cancer development, and wherein the sensitivity of the assay is at least 72.00% and the specificity of the assay is at least 75.00%, preferably wherein the panel of one or more CpGs comprises at least three CpG from DMR 214, and more preferably wherein the cancer index value is the mean β-value for the CpGs denoted by [[CG]] in SEQ ID NO: 5214;
[1415] 428. CpGs whose cancer index value is determined are located within at least DMR 214 defined by SEQ ID NO: 5214, and wherein when the cancer index for the individual is less than about 0.044 the individual is classified as not having CIN3 and/or cancer or as having a low risk of CIN3 and/or cancer development, and wherein the sensitivity of the assay is at least 72.00% and the specificity of the assay is at least 75.00%, preferably wherein the panel of one or more CpGs comprises at least three CpG from DMR 214, and more preferably wherein the cancer index value is the mean β-value for the CpGs denoted by [[CG]] in SEQ ID NO: 5214;
[1416] 429. CpGs whose cancer index value is determined are located within at least DMR 215 defined by SEQ ID NO: 5215, and wherein when the cancer index for the individual is about 0.042 or more the individual is classified as having CIN3 and/or cancer or as having a high risk of CIN3 and/or cancer development, and wherein the sensitivity of the assay is at least 75.00% and the specificity of the assay is at least 75.00%, preferably wherein the panel of one or more CpGs comprises at least two CpG from DMR 215, and more preferably wherein the cancer index value is the mean β-value for the CpGs denoted by [[CG]] in SEQ ID NO: 5215;
[1417] 430. CpGs whose cancer index value is determined are located within at least DMR 215 defined by SEQ ID NO: 5215, and wherein when the cancer index for the individual is less than about 0.042 the individual is classified as not having CIN3 and/or cancer or as having a low risk of CIN3 and/or cancer development, and wherein the sensitivity of the assay is at least 75.00% and the specificity of the assay is at least 75.00%, preferably wherein the panel of one or more CpGs comprises at least two CpG from DMR 215, and more preferably wherein the cancer index value is the mean β-value for the CpGs denoted by [[CG]] in SEQ ID NO: 5215;
[1418] 431. CpGs whose cancer index value is determined are located within at least DMR 216 defined by SEQ ID NO: 5216, and wherein when the cancer index for the individual is about 0.066 or more the individual is classified as having CIN3 and/or cancer or as having a high risk of CIN3 and/or cancer development, and wherein the sensitivity of the assay is at least 69.00% and the specificity of the assay is at least 75.00%, preferably wherein the panel of one or more CpGs comprises at least five CpG from DMR 216, and more preferably wherein the cancer index value is the mean β-value for the CpGs denoted by [[CG]] in SEQ ID NO: 5216;
[1419] 432. CpGs whose cancer index value is determined are located within at least DMR 216 defined by SEQ ID NO: 5216, and wherein when the cancer index for the individual is less than about 0.066 the individual is classified as not having CIN3 and/or cancer or as having a low risk of CIN3 and/or cancer development, and wherein the sensitivity of the assay is at least 69.00% and the specificity of the assay is at least 75.00%, preferably wherein the panel of one or more CpGs comprises at least five CpG from DMR 216, and more preferably wherein the cancer index value is the mean β-value for the CpGs denoted by [[CG]] in SEQ ID NO: 5216;
[1420] 433. CpGs whose cancer index value is determined are located within at least DMR 217 defined by SEQ ID NO: 5217, and wherein when the cancer index for the individual is about 0.027 or more the individual is classified as having CIN3 and/or cancer or as having a high risk of CIN3 and/or cancer development, and wherein the sensitivity of the assay is at least 74.00% and the specificity of the assay is at least 75.00%, preferably wherein the panel of one or more CpGs comprises at least seven CpG from DMR 217, and more preferably wherein the cancer index value is the mean β-value for the CpGs denoted by [[CG]] in SEQ ID NO: 5217;
[1421] 434. CpGs whose cancer index value is determined are located within at least DMR 217 defined by SEQ ID NO: 5217, and wherein when the cancer index for the individual is less than about 0.027 the individual is classified as not having CIN3 and/or cancer or as having a low risk of CIN3 and/or cancer development, and wherein the sensitivity of the assay is at least 74.00% and the specificity of the assay is at least 75.00%, preferably wherein the panel of one or more CpGs comprises at least seven CpG from DMR 217, and more preferably wherein the cancer index value is the mean β-value for the CpGs denoted by [[CG]] in SEQ ID NO: 5217;
[1422] 435. CpGs whose cancer index value is determined are located within at least DMR 218 defined by SEQ ID NO: 5218, and wherein when the cancer index for the individual is about 0.022 or more the individual is classified as having CIN3 and/or cancer or as having a high risk of CIN3 and/or cancer development, and wherein the sensitivity of the assay is at least 72.00% and the specificity of the assay is at least 75.00%, preferably wherein the panel of one or more CpGs comprises at least three CpG from DMR 218, and more preferably wherein the cancer index value is the mean β-value for the CpGs denoted by [[CG]] in SEQ ID NO: 5218;
[1423] 436. CpGs whose cancer index value is determined are located within at least DMR 218 defined by SEQ ID NO: 5218, and wherein when the cancer index for the individual is less than about 0.022 the individual is classified as not having CIN3 and/or cancer or as having a low risk of CIN3 and/or cancer development, and wherein the sensitivity of the assay is at least 72.00% and the specificity of the assay is at least 75.00%, preferably wherein the panel of one or more CpGs comprises at least three CpG from DMR 218, and more preferably wherein the cancer index value is the mean β-value for the CpGs denoted by [[CG]] in SEQ ID NO: 5218;
[1424] 437. CpGs whose cancer index value is determined are located within at least DMR 219 defined by SEQ ID NO: 5219, and wherein when the cancer index for the individual is about 0.027 or more the individual is classified as having CIN3 and/or cancer or as having a high risk of CIN3 and/or cancer development, and wherein the sensitivity of the assay is at least 74.00% and the specificity of the assay is at least 75.00%, preferably wherein the panel of one or more CpGs comprises at least seven CpG from DMR 219, and more preferably wherein the cancer index value is the mean β-value for the CpGs denoted by [[CG]] in SEQ ID NO: 5219;
[1425] 438. CpGs whose cancer index value is determined are located within at least DMR 219 defined by SEQ ID NO: 5219, and wherein when the cancer index for the individual is less than about 0.027 the individual is classified as not having CIN3 and/or cancer or as having a low risk of CIN3 and/or cancer development, and wherein the sensitivity of the assay is at least 74.00% and the specificity of the assay is at least 75.00%, preferably wherein the panel of one or more CpGs comprises at least seven CpG from DMR 219, and more preferably wherein the cancer index value is the mean β-value for the CpGs denoted by [[CG]] in SEQ ID NO: 5219;
[1426] 439. CpGs whose cancer index value is determined are located within at least DMR 220 defined by SEQ ID NO: 5220, and wherein when the cancer index for the individual is about 0.027 or more the individual is classified as having CIN3 and/or cancer or as having a high risk of CIN3 and/or cancer development, and wherein the sensitivity of the assay is at least 74.00% and the specificity of the assay is at least 75.00%, preferably wherein the panel of one or more CpGs comprises at least seven CpG from DMR 220, and more preferably wherein the cancer index value is the mean β-value for the CpGs denoted by [[CG]] in SEQ ID NO: 5220;
[1427] 440. CpGs whose cancer index value is determined are located within at least DMR 220 defined by SEQ ID NO: 5220, and wherein when the cancer index for the individual is less than about 0.027 or more the individual is classified as having CIN3 and/or cancer or as having a high risk of CIN3 and/or cancer development, and wherein the sensitivity of the assay is at least 74.00% and the specificity of the assay is at least 75.00%, preferably wherein the panel of one or more CpGs comprises at least seven CpG from DMR 220, and more preferably wherein the cancer index value is the mean β-value for the CpGs denoted by [[CG]] in SEQ ID NO: 5220;
[1428] 441. CpGs whose cancer index value is determined are located within at least DMR 221 defined by SEQ ID NO: 5221, and wherein when the cancer index for the individual is about 0.051 or more the individual is classified as having CIN3 and/or cancer or as having a high risk of CIN3 and/or cancer development, and wherein the sensitivity of the assay is at least 71.00% and the specificity of the assay is at least 75.00%, preferably wherein the panel of one or more CpGs comprises at least eight CpG from DMR 221, and more preferably wherein the cancer index value is the mean β-value for the CpGs denoted by [[CG]] in SEQ ID NO: 5221;
[1429] 442. CpGs whose cancer index value is determined are located within at least DMR 221 defined by SEQ ID NO: 5221, and wherein when the cancer index for the individual is less than about 0.051 the individual is classified as not having CIN3 and/or cancer or as having a low risk of CIN3 and/or cancer development, and wherein the sensitivity of the assay is at least 71.00% and the specificity of the assay is at least 75.00%, preferably wherein the panel of one or more CpGs comprises at least eight CpG from DMR 221, and more preferably wherein the cancer index value is the mean β-value for the CpGs denoted by [[CG]] in SEQ ID NO: 5221;
[1430] 443. CpGs whose cancer index value is determined are located within at least DMR 222 defined by SEQ ID NO: 5222, and wherein when the cancer index for the individual is about 0.044 or more the individual is classified as having CIN3 and/or cancer or as having a high risk of CIN3 and/or cancer development, and wherein the sensitivity of the assay is at least 71.00% and the specificity of the assay is at least 75.00%, preferably wherein the panel of one or more CpGs comprises at least eight CpG from DMR 222, and more preferably wherein the cancer index value is the mean β-value for the CpGs denoted by [[CG]] in SEQ ID NO: 5222;
[1431] 444. CpGs whose cancer index value is determined are located within at least DMR 222 defined by SEQ ID NO: 5222, and wherein when the cancer index for the individual is less than about 0.044 the individual is classified as not having CIN3 and/or cancer or as having a low risk of CIN3 and/or cancer development, and wherein the sensitivity of the assay is at least 71.00% and the specificity of the assay is at least 75.00%, preferably wherein the panel of one or more CpGs comprises at least eight CpG from DMR 222, and more preferably wherein the cancer index value is the mean β-value for the CpGs denoted by [[CG]] in SEQ ID NO: 5222;
[1432] 445. CpGs whose cancer index value is determined are located within at least DMR 223 defined by SEQ ID NO: 5223, and wherein when the cancer index for the individual is about 0.044 or more the individual is classified as having CIN3 and/or cancer or as having a high risk of CIN3 and/or cancer development, and wherein the sensitivity of the assay is at least 71.00% and the specificity of the assay is at least 75.00%, preferably wherein the panel of one or more CpGs comprises at least eight CpG from DMR 223, and more preferably wherein the cancer index value is the mean β-value for the CpGs denoted by [[CG]] in SEQ ID NO: 5223;
[1433] 446. CpGs whose cancer index value is determined are located within at least DMR 223 defined by SEQ ID NO: 5223, and wherein when the cancer index for the individual is less than about 0.044 the individual is classified as not having CIN3 and/or cancer or as having a low risk of CIN3 and/or cancer development, and wherein the sensitivity of the assay is at least 71.00% and the specificity of the assay is at least 75.00%, preferably wherein the panel of one or more CpGs comprises at least eight CpG from DMR 223, and more preferably wherein the cancer index value is the mean β-value for the CpGs denoted by [[CG]] in SEQ ID NO: 5223;
[1434] 447. CpGs whose cancer index value is determined are located within at least DMR 224 defined by SEQ ID NO: 5224, and wherein when the cancer index for the individual is about 0.049 or more the individual is classified as having CIN3 and/or cancer or as having a high risk of CIN3 and/or cancer development, and wherein the sensitivity of the assay is at least 72.00% and the specificity of the assay is at least 75.00%, preferably wherein the panel of one or more CpGs comprises at least nine CpG from DMR 224, and more preferably wherein the cancer index value is the mean β-value for the CpGs denoted by [[CG]] in SEQ ID NO: 5224;
[1435] 448. CpGs whose cancer index value is determined are located within at least DMR 224 defined by SEQ ID NO: 5224, and wherein when the cancer index for the individual is less than about 0.049 the individual is classified as not having CIN3 and/or cancer or as having a low risk of CIN3 and/or cancer development, and wherein the sensitivity of the assay is at least 72.00% and the specificity of the assay is at least 75.00%, preferably wherein the panel of one or more CpGs comprises at least nine CpG from DMR 224, and more preferably wherein the cancer index value is the mean β-value for the CpGs denoted by [[CG]] in SEQ ID NO: 5224;
[1436] 449. CpGs whose cancer index value is determined are located within at least DMR 225 defined by SEQ ID NO: 5225, and wherein when the cancer index for the individual is about 0.044 or more the individual is classified as having CIN3 and/or cancer or as having a high risk of CIN3 and/or cancer development, and wherein the sensitivity of the assay is at least 74.00% and the specificity of the assay is at least 75.00%, preferably wherein the panel of one or more CpGs comprises at least five CpG from DMR 225, and more preferably wherein the cancer index value is the mean β-value for the CpGs denoted by [[CG]] in SEQ ID NO: 5225;
[1437] 450. CpGs whose cancer index value is determined are located within at least DMR 225 defined by SEQ ID NO: 5225, and wherein when the cancer index for the individual is less than about 0.044 the individual is classified as not having CIN3 and/or cancer or as having a low risk of CIN3 and/or cancer development, and wherein the sensitivity of the assay is at least 74.00% and the specificity of the assay is at least 75.00%, preferably wherein the panel of one or more CpGs comprises at least five CpG from DMR 225, and more preferably wherein the cancer index value is the mean β-value for the CpGs denoted by [[CG]] in SEQ ID NO: 5225;
[1438] 451. CpGs whose cancer index value is determined are located within at least DMR 226 defined by SEQ ID NO: 5226, and wherein when the cancer index for the individual is about 0.049 or more the individual is classified as having CIN3 and/or cancer or as having a high risk of CIN3 and/or cancer development, and wherein the sensitivity of the assay is at least 72.00% and the specificity of the assay is at least 75.00%, preferably wherein the panel of one or more CpGs comprises at least nine CpG from DMR 226, and more preferably wherein the cancer index value is the mean β-value for the CpGs denoted by [[CG]] in SEQ ID NO: 5226;
[1439] 452. CpGs whose cancer index value is determined are located within at least DMR 226 defined by SEQ ID NO: 5226, and wherein when the cancer index for the individual is less than about 0.049 the individual is classified as not having CIN3 and/or cancer or as having a low risk of CIN3 and/or cancer development, and wherein the sensitivity of the assay is at least 72.00% and the specificity of the assay is at least 75.00%, preferably wherein the panel of one or more CpGs comprises at least nine CpG from DMR 226, and more preferably wherein the cancer index value is the mean β-value for the CpGs denoted by [[CG]] in SEQ ID NO: 5226;
[1440] 453. CpGs whose cancer index value is determined are located within at least DMR 227 defined by SEQ ID NO: 5227, and wherein when the cancer index for the individual is about 0.033 or more the individual is classified as having CIN3 and/or cancer or as having a high risk of CIN3 and/or cancer development, and wherein the sensitivity of the assay is at least 69.00% and the specificity of the assay is at least 75.00%, preferably wherein the panel of one or more CpGs comprises at least seven CpG from DMR 227, and more preferably wherein the cancer index value is the mean β-value for the CpGs denoted by [[CG]] in SEQ ID NO: 5227;
[1441] 454. CpGs whose cancer index value is determined are located within at least DMR 227 defined by SEQ ID NO: 5227, and wherein when the cancer index for the individual is less than about 0.033 the individual is classified as not having CIN3 and/or cancer or as having a low risk of CIN3 and/or cancer development, and wherein the sensitivity of the assay is at least 69.00% and the specificity of the assay is at least 75.00%, preferably wherein the panel of one or more CpGs comprises at least seven CpG from DMR 227, and more preferably wherein the cancer index value is the mean β-value for the CpGs denoted by [[CG]] in SEQ ID NO: 5227;
[1442] 455. CpGs whose cancer index value is determined are located within at least DMR 228 defined by SEQ ID NO: 5228, and wherein when the cancer index for the individual is about 0.023 or more the individual is classified as having CIN3 and/or cancer or as having a high risk of CIN3 and/or cancer development, and wherein the sensitivity of the assay is at least 74.00% and the specificity of the assay is at least 75.00%, preferably wherein the panel of one or more CpGs comprises at least five CpG from DMR 228, and more preferably wherein the cancer index value is the mean β-value for the CpGs denoted by [[CG]] in SEQ ID NO: 5228;
[1443] 456. CpGs whose cancer index value is determined are located within at least DMR 228 defined by SEQ ID NO: 5228, and wherein when the cancer index for the individual is less than about 0.023 the individual is classified as not having CIN3 and/or cancer or as having a low risk of CIN3 and/or cancer development, and wherein the sensitivity of the assay is at least 74.00% and the specificity of the assay is at least 75.00%, preferably wherein the panel of one or more CpGs comprises at least five CpG from DMR 228, and more preferably wherein the cancer index value is the mean β-value for the CpGs denoted by [[CG]] in SEQ ID NO: 5228;
[1444] 457. CpGs whose cancer index value is determined are located within at least DMR 229 defined by SEQ ID NO: 5229, and wherein when the cancer index for the individual is about 0.033 or more the individual is classified as having CIN3 and/or cancer or as having a high risk of CIN3 and/or cancer development, and wherein the sensitivity of the assay is at least 69.00% and the specificity of the assay is at least 75.00%, preferably wherein the panel of one or more CpGs comprises at least seven CpG from DMR 229, and more preferably wherein the cancer index value is the mean β-value for the CpGs denoted by [[CG]] in SEQ ID NO: 5229;
[1445] 458. CpGs whose cancer index value is determined are located within at least DMR 229 defined by SEQ ID NO: 5229, and wherein when the cancer index for the individual is less than about 0.033 the individual is classified as not having CIN3 and/or cancer or as having a low risk of CIN3 and/or cancer development, and wherein the sensitivity of the assay is at least 69.00% and the specificity of the assay is at least 75.00%, preferably wherein the panel of one or more CpGs comprises at least seven CpG from DMR 229, and more preferably wherein the cancer index value is the mean β-value for the CpGs denoted by [[CG]] in SEQ ID NO: 5229;
[1446] 459. CpGs whose cancer index value is determined are located within at least DMR 230 defined by SEQ ID NO: 5230, and wherein when the cancer index for the individual is about 0.033 or more the individual is classified as having CIN3 and/or cancer or as having a high risk of CIN3 and/or cancer development, and wherein the sensitivity of the assay is at least 69.00% and the specificity of the assay is at least 75.00%, preferably wherein the panel of one or more CpGs comprises at least seven CpG from DMR 230, and more preferably wherein the cancer index value is the mean β-value for the CpGs denoted by [[CG]] in SEQ ID NO: 5230;
[1447] 460. CpGs whose cancer index value is determined are located within at least DMR 230 defined by SEQ ID NO: 5230, and wherein when the cancer index for the individual is less than about 0.033 the individual is classified as not having CIN3 and/or cancer or as having a low risk of CIN3 and/or cancer development, and wherein the sensitivity of the assay is at least 69.00% and the specificity of the assay is at least 75.00%, preferably wherein the panel of one or more CpGs comprises at least seven CpG from DMR 230, and more preferably wherein the cancer index value is the mean β-value for the CpGs denoted by [[CG]] in SEQ ID NO: 5230;
[1448] 461. CpGs whose cancer index value is determined are located within at least DMR 231 defined by SEQ ID NO: 5231, and wherein when the cancer index for the individual is about 0.023 or more the individual is classified as having CIN3 and/or cancer or as having a high risk of CIN3 and/or cancer development, and wherein the sensitivity of the assay is at least 71.00% and the specificity of the assay is at least 75.00%, preferably wherein the panel of one or more CpGs comprises at least five CpG from DMR 231, and more preferably wherein the cancer index value is the mean β-value for the CpGs denoted by [[CG]] in SEQ ID NO: 5231;
[1449] 462. CpGs whose cancer index value is determined are located within at least DMR 231 defined by SEQ ID NO: 5231, and wherein when the cancer index for the individual is less than about 0.023 the individual is classified as not having CIN3 and/or cancer or as having a low risk of CIN3 and/or cancer development, and wherein the sensitivity of the assay is at least 71.00% and the specificity of the assay is at least 75.00%, preferably wherein the panel of one or more CpGs comprises at least five CpG from DMR 231, and more preferably wherein the cancer index value is the mean β-value for the CpGs denoted by [[CG]] in SEQ ID NO: 5231;
[1450] 463. CpGs whose cancer index value is determined are located within at least DMR 232 defined by SEQ ID NO: 5232, and wherein when the cancer index for the individual is about 0.079 or more the individual is classified as having CIN3 and/or cancer or as having a high risk of CIN3 and/or cancer development, and wherein the sensitivity of the assay is at least 70.00% and the specificity of the assay is at least 75.00%, preferably wherein the panel of one or more CpGs comprises at least nine CpG from DMR 232, and more preferably wherein the cancer index value is the mean β-value for the CpGs denoted by [[CG]] in SEQ ID NO: 5232;
[1451] 464. CpGs whose cancer index value is determined are located within at least DMR 232 defined by SEQ ID NO: 5232, and wherein when the cancer index for the individual is less than about 0.079 the individual is classified as not having CIN3 and/or cancer or as having a low risk of CIN3 and/or cancer development, and wherein the sensitivity of the assay is at least 70.00% and the specificity of the assay is at least 75.00%, preferably wherein the panel of one or more CpGs comprises at least nine CpG from DMR 232, and more preferably wherein the cancer index value is the mean β-value for the CpGs denoted by [[CG]] in SEQ ID NO: 5232;
[1452] 465. CpGs whose cancer index value is determined are located within at least DMR 233 defined by SEQ ID NO: 5233, and wherein when the cancer index for the individual is about 0.023 or more the individual is classified as having CIN3 and/or cancer or as having a high risk of CIN3 and/or cancer development, and wherein the sensitivity of the assay is at least 71.00% and the specificity of the assay is at least 75.00%, preferably wherein the panel of one or more CpGs comprises at least five CpG from DMR 233, and more preferably wherein the cancer index value is the mean β-value for the CpGs denoted by [[CG]] in SEQ ID NO: 5233;
[1453] 466. CpGs whose cancer index value is determined are located within at least DMR 233 defined by SEQ ID NO: 5233, and wherein when the cancer index for the individual is less than about 0.023 the individual is classified as not having CIN3 and/or cancer or as having a low risk of CIN3 and/or cancer development, and wherein the sensitivity of the assay is at least 71.00% and the specificity of the assay is at least 75.00%, preferably wherein the panel of one or more CpGs comprises at least five CpG from DMR 233, and more preferably wherein the cancer index value is the mean β-value for the CpGs denoted by [[CG]] in SEQ ID NO: 5233;
[1454] 467. CpGs whose cancer index value is determined are located within at least DMR 234 defined by SEQ ID NO: 5234, and wherein when the cancer index for the individual is about 0.04 or more the individual is classified as having CIN3 and/or cancer or as having a high risk of CIN3 and/or cancer development, and wherein the sensitivity of the assay is at least 71.00% and the specificity of the assay is at least 75.00%, preferably wherein the panel of one or more CpGs comprises at least two CpG from DMR 234, and more preferably wherein the cancer index value is the mean β-value for the CpGs denoted by [[CG]] in SEQ ID NO: 5234;
[1455] 468. CpGs whose cancer index value is determined are located within at least DMR 234 defined by SEQ ID NO: 5234, and wherein when the cancer index for the individual is less than about 0.04 the individual is classified as not having CIN3 and/or cancer or as having a low risk of CIN3 and/or cancer development, and wherein the sensitivity of the assay is at least 71.00% and the specificity of the assay is at least 75.00%, preferably wherein the panel of one or more CpGs comprises at least two CpG from DMR 234, and more preferably wherein the cancer index value is the mean β-value for the CpGs denoted by [[CG]] in SEQ ID NO: 5234;
[1456] 469. CpGs whose cancer index value is determined are located within at least DMR 235 defined by SEQ ID NO: 5235, and wherein when the cancer index for the individual is about 0.051 or more the individual is classified as having CIN3 and/or cancer or as having a high risk of CIN3 and/or cancer development, and wherein the sensitivity of the assay is at least 72.00% and the specificity of the assay is at least 75.00%, preferably wherein the panel of one or more CpGs comprises at least three CpG from DMR 235, and more preferably wherein the cancer index value is the mean β-value for the CpGs denoted by [[CG]] in SEQ ID NO: 5235;
[1457] 470. CpGs whose cancer index value is determined are located within at least DMR 235 defined by SEQ ID NO: 5235, and wherein when the cancer index for the individual is less than about 0.051 the individual is classified as not having CIN3 and/or cancer or as having a low risk of CIN3 and/or cancer development, and wherein the sensitivity of the assay is at least 72.00% and the specificity of the assay is at least 75.00%, preferably wherein the panel of one or more CpGs comprises at least three CpG from DMR 235, and more preferably wherein the cancer index value is the mean β-value for the CpGs denoted by [[CG]] in SEQ ID NO: 5235;
[1458] 471. CpGs whose cancer index value is determined are located within at least DMR 236 defined by SEQ ID NO: 5236, and wherein when the cancer index for the individual is about 0.023 or more the individual is classified as having CIN3 and/or cancer or as having a high risk of CIN3 and/or cancer development, and wherein the sensitivity of the assay is at least 71.00% and the specificity of the assay is at least 75.00%, preferably wherein the panel of one or more CpGs comprises at least five CpG from DMR 236, and more preferably wherein the cancer index value is the mean β-value for the CpGs denoted by [[CG]] in SEQ ID NO: 5236;
[1459] 472. CpGs whose cancer index value is determined are located within at least DMR 236 defined by SEQ ID NO: 5236, and wherein when the cancer index for the individual is less than about 0.023 the individual is classified as not having CIN3 and/or cancer or as having a low risk of CIN3 and/or cancer development, and wherein the sensitivity of the assay is at least 71.00% and the specificity of the assay is at least 75.00%, preferably wherein the panel of one or more CpGs comprises at least five CpG from DMR 236, and more preferably wherein the cancer index value is the mean β-value for the CpGs denoted by [[CG]] in SEQ ID NO: 5236;
[1460] 473. CpGs whose cancer index value is determined are located within at least DMR 237 defined by SEQ ID NO: 5237, and wherein when the cancer index for the individual is about 0.033 or more the individual is classified as having CIN3 and/or cancer or as having a high risk of CIN3 and/or cancer development, and wherein the sensitivity of the assay is at least 69.00% and the specificity of the assay is at least 75.00%, preferably wherein the panel of one or more CpGs comprises at least seven CpG from DMR 237, and more preferably wherein the cancer index value is the mean β-value for the CpGs denoted by [[CG]] in SEQ ID NO: 5237;
[1461] 474. CpGs whose cancer index value is determined are located within at least DMR 237 defined by SEQ ID NO: 5237, and wherein when the cancer index for the individual is less than about 0.033 the individual is classified as not having CIN3 and/or cancer or as having a low risk of CIN3 and/or cancer development, and wherein the sensitivity of the assay is at least 69.00% and the specificity of the assay is at least 75.00%, preferably wherein the panel of one or more CpGs comprises at least seven CpG from DMR 237, and more preferably wherein the cancer index value is the mean β-value for the CpGs denoted by [[CG]] in SEQ ID NO: 5237;
[1462] 475. CpGs whose cancer index value is determined are located within at least DMR 238 defined by SEQ ID NO: 5238, and wherein when the cancer index for the individual is about 0.048 or more the individual is classified as having CIN3 and/or cancer or as having a high risk of CIN3 and/or cancer development, and wherein the sensitivity of the assay is at least 67.00% and the specificity of the assay is at least 75.00%, preferably wherein the panel of one or more CpGs comprises at least four CpG from DMR 238, and more preferably wherein the cancer index value is the mean β-value for the CpGs denoted by [[CG]] in SEQ ID NO: 5238;
[1463] 476. CpGs whose cancer index value is determined are located within at least DMR 238 defined by SEQ ID NO: 5238, and wherein when the cancer index for the individual is less than about 0.048 the individual is classified as not having CIN3 and/or cancer or as having a low risk of CIN3 and/or cancer development, and wherein the sensitivity of the assay is at least 67.00% and the specificity of the assay is at least 75.00%, preferably wherein the panel of one or more CpGs comprises at least four CpG from DMR 238, and more preferably wherein the cancer index value is the mean β-value for the CpGs denoted by [[CG]] in SEQ ID NO: 5238;
[1464] 477. CpGs whose cancer index value is determined are located within at least DMR 239 defined by SEQ ID NO: 5239, and wherein when the cancer index for the individual is about 0.063 or more the individual is classified as having CIN3 and/or cancer or as having a high risk of CIN3 and/or cancer development, and wherein the sensitivity of the assay is at least 75.00% and the specificity of the assay is at least 75.00%, preferably wherein the panel of one or more CpGs comprises at least one CpG from DMR 239, and more preferably wherein the cancer index value is the mean β-value for the CpGs denoted by [[CG]] in SEQ ID NO: 5239;
[1465] 478. CpGs whose cancer index value is determined are located within at least DMR 239 defined by SEQ ID NO: 5239, and wherein when the cancer index for the individual is less than about 0.063 the individual is classified as not having CIN3 and/or cancer or as having a low risk of CIN3 and/or cancer development, and wherein the sensitivity of the assay is at least 75.00% and the specificity of the assay is at least 75.00%, preferably wherein the panel of one or more CpGs comprises at least one CpG from DMR 239, and more preferably wherein the cancer index value is the mean β-value for the CpGs denoted by [[CG]] in SEQ ID NO: 5239;
[1466] 479. CpGs whose cancer index value is determined are located within at least DMR 240 defined by SEQ ID NO: 5240, and wherein when the cancer index for the individual is about 0.05 or more the individual is classified as having CIN3 and/or cancer or as having a high risk of CIN3 and/or cancer development, and wherein the sensitivity of the assay is at least 74.00% and the specificity of the assay is at least 75.00%, preferably wherein the panel of one or more CpGs comprises at least four CpG from DMR 240, and more preferably wherein the cancer index value is the mean β-value for the CpGs denoted by [[CG]] in SEQ ID NO: 5240;
[1467] 480. CpGs whose cancer index value is determined are located within at least DMR 240 defined by SEQ ID NO: 5240, and wherein when the cancer index for the individual is less than about 0.05 the individual is classified as not having CIN3 and/or cancer or as having a low risk of CIN3 and/or cancer development, and wherein the sensitivity of the assay is at least 74.00% and the specificity of the assay is at least 75.00%, preferably wherein the panel of one or more CpGs comprises at least four CpG from DMR 240, and more preferably wherein the cancer index value is the mean β-value for the CpGs denoted by [[CG]] in SEQ ID NO: 5240;
[1468] 481. CpGs whose cancer index value is determined are located within at least DMR 241 defined by SEQ ID NO: 5241, and wherein when the cancer index for the individual is about 0.035 or more the individual is classified as having CIN3 and/or cancer or as having a high risk of CIN3 and/or cancer development, and wherein the sensitivity of preferably wherein the panel of one or more CpGs comprises at least five CpG from DMR 241, and more preferably wherein the cancer index value is the mean β-value for the CpGs denoted by [[CG]] in SEQ ID NO: 5241;
[1469] 482. CpGs whose cancer index value is determined are located within at least DMR 241 defined by SEQ ID NO: 5241, and wherein when the cancer index for the individual is less than about 0.035 the individual is classified as not having CIN3 and/or cancer or as having a low risk of CIN3 and/or cancer development, and wherein the sensitivity of the assay is at least 76.00% and the specificity of the assay is at least 75.00%, preferably wherein the panel of one or more CpGs comprises at least five CpG from DMR 241, and more preferably wherein the cancer index value is the mean β-value for the CpGs denoted by [[CG]] in SEQ ID NO: 5241;
[1470] 483. CpGs whose cancer index value is determined are located within at least DMR 242 defined by SEQ ID NO: 5242, and wherein when the cancer index for the individual is about 0.058 or more the individual is classified as having CIN3 and/or cancer or as having a high risk of CIN3 and/or cancer development, and wherein the sensitivity of the assay is at least 69.00% and the specificity of the assay is at least 75.00%, preferably wherein the panel of one or more CpGs comprises at least five CpG from DMR 242, and more preferably wherein the cancer index value is the mean β-value for the CpGs denoted by [[CG]] in SEQ ID NO: 5242;
[1471] 484. CpGs whose cancer index value is determined are located within at least DMR 242 defined by SEQ ID NO: 5242, and wherein when the cancer index for the individual is less than about 0.058 the individual is classified as not having CIN3 and/or cancer or as having a low risk of CIN3 and/or cancer development, and wherein the sensitivity of the assay is at least 69.00% and the specificity of the assay is at least 75.00%, preferably wherein the panel of one or more CpGs comprises at least five CpG from DMR 242, and more preferably wherein the cancer index value is the mean β-value for the CpGs denoted by [[CG]] in SEQ ID NO: 5242;
[1472] 485. CpGs whose cancer index value is determined are located within at least DMR 243 defined by SEQ ID NO: 5243, and wherein when the cancer index for the individual is about 0.039 or more the individual is classified as having CIN3 and/or cancer or as having a high risk of CIN3 and/or cancer development, and wherein the sensitivity of the assay is at least 71.00% and the specificity of the assay is at least 75.00%, preferably wherein the panel of one or more CpGs comprises at least eight CpG from DMR 243, and more preferably wherein the cancer index value is the mean β-value for the CpGs denoted by [[CG]] in SEQ ID NO: 5243;
[1473] 486. CpGs whose cancer index value is determined are located within at least DMR 243 defined by SEQ ID NO: 5243, and wherein when the cancer index for the individual is less than about 0.039 the individual is classified as not having CIN3 and/or cancer or as having a low risk of CIN3 and/or cancer development, and wherein the sensitivity of the assay is at least 71.00% and the specificity of the assay is at least 75.00%, preferably wherein the panel of one or more CpGs comprises at least eight CpG from DMR 243, and more preferably wherein the cancer index value is the mean β-value for the CpGs denoted by [[CG]] in SEQ ID NO: 5243;
[1474] 487. CpGs whose cancer index value is determined are located within at least DMR 244 defined by SEQ ID NO: 5244, and wherein when the cancer index for the individual is about 0.028 or more the individual is classified as having CIN3 and/or cancer or as having a high risk of CIN3 and/or cancer development, and wherein the sensitivity of the assay is at least 67.00% and the specificity of the assay is at least 75.00%, preferably wherein the panel of one or more CpGs comprises at least ten CpG from DMR 244, and more preferably wherein the cancer index value is the mean β-value for the CpGs denoted by [[CG]] in SEQ ID NO: 5244;
[1475] 488. CpGs whose cancer index value is determined are located within at least DMR 244 defined by SEQ ID NO: 5244, and wherein when the cancer index for the individual is less than about 0.028 the individual is classified as not having CIN3 and/or cancer or as having a low risk of CIN3 and/or cancer development, and wherein the sensitivity of the assay is at least 67.00% and the specificity of the assay is at least 75.00%, preferably wherein the panel of one or more CpGs comprises at least ten CpG from DMR 244, and more preferably wherein the cancer index value is the mean β-value for the CpGs denoted by [[CG]] in SEQ ID NO: 5244;
[1476] 489. CpGs whose cancer index value is determined are located within at least DMR 245 defined by SEQ ID NO: 5245, and wherein when the cancer index for the individual is about 0.034 or more the individual is classified as having CIN3 and/or cancer or as having a high risk of CIN3 and/or cancer development, and wherein the sensitivity of the assay is at least 69.00% and the specificity of the assay is at least 75.00%, preferably wherein the panel of one or more CpGs comprises at least three CpG from DMR 245, and more preferably wherein the cancer index value is the mean β-value for the CpGs denoted by [[CG]] in SEQ ID NO: 5245;
[1477] 490. CpGs whose cancer index value is determined are located within at least DMR 245 defined by SEQ ID NO: 5245, and wherein when the cancer index for the individual is less than about 0.034 the individual is classified as not having CIN3 and/or cancer or as having a low risk of CIN3 and/or cancer development, and wherein the sensitivity of the assay is at least 69.00% and the specificity of the assay is at least 75.00%, preferably wherein the panel of one or more CpGs comprises at least three CpG from DMR 245, and more preferably wherein the cancer index value is the mean β-value for the CpGs denoted by [[CG]] in SEQ ID NO: 5245;
[1478] 491. CpGs whose cancer index value is determined are located within at least DMR 246 defined by SEQ ID NO: 5246, and wherein when the cancer index for the individual is about 0.022 or more the individual is classified as having CIN3 and/or cancer or as having a high risk of CIN3 and/or cancer development, and wherein the sensitivity of the assay is at least 76.00% and the specificity of the assay is at least 75.00%, preferably wherein the panel of one or more CpGs comprises at least four CpG from DMR 246, and more preferably wherein the cancer index value is the mean β-value for the CpGs denoted by [[CG]] in SEQ ID NO: 5246;
[1479] 492. CpGs whose cancer index value is determined are located within at least DMR 246 defined by SEQ ID NO: 5246, and wherein when the cancer index for the individual is less than about 0.022 the individual is classified as not having CIN3 and/or cancer or as having a low risk of CIN3 and/or cancer development, and wherein the sensitivity of the assay is at least 76.00% and the specificity of the assay is at least 75.00%, preferably wherein the panel of one or more CpGs comprises at least four CpG from DMR 246, and more preferably wherein the cancer index value is the mean β-value for the CpGs denoted by [[CG]] in SEQ ID NO: 5246;
[1480] 493. CpGs whose cancer index value is determined are located within at least DMR 247 defined by SEQ ID NO: 5247, and wherein when the cancer index for the individual is about 0.039 or more the individual is classified as having CIN3 and/or cancer or as having a high risk of CIN3 and/or cancer development, and wherein the sensitivity of the assay is at least 71.00% and the specificity of the assay is at least 75.00%, preferably wherein the panel of one or more CpGs comprises at least eight CpG from DMR 247, and more preferably wherein the cancer index value is the mean β-value for the CpGs denoted by [[CG]] in SEQ ID NO: 5247;
[1481] 494. CpGs whose cancer index value is determined are located within at least DMR 247 defined by SEQ ID NO: 5247, and wherein when the cancer index for the individual is less than about 0.039 the individual is classified as not having CIN3 and/or cancer or as having a low risk of CIN3 and/or cancer development, and wherein the sensitivity of the assay is at least 71.00% and the specificity of the assay is at least 75.00%, preferably wherein the panel of one or more CpGs comprises at least eight CpG from DMR 247, and more preferably wherein the cancer index value is the mean β-value for the CpGs denoted by [[CG]] in SEQ ID NO: 5247;
[1482] 495. CpGs whose cancer index value is determined are located within at least DMR 248 defined by SEQ ID NO: 5248, and wherein when the cancer index for the individual is about 0.187 or more the individual is classified as having CIN3 and/or cancer or as having a high risk of CIN3 and/or cancer development, and wherein the sensitivity of the assay is at least 67.00% and the specificity of the assay is at least 75.00%, preferably wherein the panel of one or more CpGs comprises at least nine CpG from DMR 248, and more preferably wherein the cancer index value is the mean β-value for the CpGs denoted by [[CG]] in SEQ ID NO: 5248;
[1483] 496. CpGs whose cancer index value is determined are located within at least DMR 248 defined by SEQ ID NO: 5248, and wherein when the cancer index for the individual is less than about 0.187 the individual is classified as not having CIN3 and/or cancer or as having a low risk of CIN3 and/or cancer development, and wherein the sensitivity of the assay is at least 67.00% and the specificity of the assay is at least 75.00%, preferably wherein the panel of one or more CpGs comprises at least nine CpG from DMR 248, and more preferably wherein the cancer index value is the mean β-value for the CpGs denoted by [[CG]] in SEQ ID NO: 5248;
[1484] 497. CpGs whose cancer index value is determined are located within at least DMR 249 defined by SEQ ID NO: 5249, and wherein when the cancer index for the individual is about 0.042 or more the individual is classified as having CIN3 and/or cancer or as having a high risk of CIN3 and/or cancer development, and wherein the sensitivity of the assay is at least 71.00% and the specificity of the assay is at least 75.00%, preferably wherein the panel of one or more CpGs comprises at least five CpG from DMR 249, and more preferably wherein the cancer index value is the mean β-value for the CpGs denoted by [[CG]] in SEQ ID NO: 5249;
[1485] 498. CpGs whose cancer index value is determined are located within at least DMR 249 defined by SEQ ID NO: 5249, and wherein when the cancer index for the individual is less than about 0.042 the individual is classified as not having CIN3 and/or cancer or as having a low risk of CIN3 and/or cancer development, and wherein the sensitivity of the assay is at least 71.00% and the specificity of the assay is at least 75.00%, preferably wherein the panel of one or more CpGs comprises at least five CpG from DMR 249, and more preferably wherein the cancer index value is the mean β-value for the CpGs denoted by [[CG]] in SEQ ID NO: 5249;
[1486] 499. CpGs whose cancer index value is determined are located within at least DMR 250 defined by SEQ ID NO: 5250, and wherein when the cancer index for the individual is about 0.042 or more the individual is classified as having CIN3 and/or cancer or as having a high risk of CIN3 and/or cancer development, and wherein the sensitivity of the assay is at least 71.00% and the specificity of the assay is at least 75.00%, preferably wherein the panel of one or more CpGs comprises at least five CpG from DMR 250, and more preferably wherein the cancer index value is the mean β-value for the CpGs denoted by [[CG]] in SEQ ID NO: 5250;
[1487] 500. CpGs whose cancer index value is determined are located within at least DMR 250 defined by SEQ ID NO: 5250, and wherein when the cancer index for the individual is less than about 0.042 the individual is classified as not having CIN3 and/or cancer or as having a low risk of CIN3 and/or cancer development, and wherein the sensitivity of the assay is at least 71.00% and the specificity of the assay is at least 75.00%, preferably wherein the panel of one or more CpGs comprises at least five CpG from DMR 250, and more preferably wherein the cancer index value is the mean β-value for the CpGs denoted by [[CG]] in SEQ ID NO: 5250;
[1488] 501. CpGs whose cancer index value is determined are located within at least DMR 251 defined by SEQ ID NO: 5251, and wherein when the cancer index for the individual is about 0.06 or more the individual is classified as having CIN3 and/or cancer or as having a high risk of CIN3 and/or cancer development, and wherein the sensitivity of the assay is at least 67.00% and the specificity of the assay is at least 75.00%, preferably wherein the panel of one or more CpGs comprises at least seven CpG from DMR 251, and more preferably wherein the cancer index value is the mean β-value for the CpGs denoted by [[CG]] in SEQ ID NO: 5251;
[1489] 502. CpGs whose cancer index value is determined are located within at least DMR 251 defined by SEQ ID NO: 5251, and wherein when the cancer index for the individual is less than about 0.06 the individual is classified as not having CIN3 and/or cancer or as having a low risk of CIN3 and/or cancer development, and wherein the sensitivity of the assay is at least 67.00% and the specificity of the assay is at least 75.00%, preferably wherein the panel of one or more CpGs comprises at least seven CpG from DMR 251, and more preferably wherein the cancer index value is the mean β-value for the CpGs denoted by [[CG]] in SEQ ID NO: 5251;
[1490] 503. CpGs whose cancer index value is determined are located within at least DMR 252 defined by SEQ ID NO: 5252, and wherein when the cancer index for the individual is about 0.04 or more the individual is classified as having CIN3 and/or cancer or as having a high risk of CIN3 and/or cancer development, and wherein the sensitivity of the assay is at least 68.00% and the specificity of the assay is at least 75.00%, preferably wherein the panel of one or more CpGs comprises at least eight CpG from DMR 252, and more preferably wherein the cancer index value is the mean β-value for the CpGs denoted by [[CG]] in SEQ ID NO: 5252;
[1491] 504. CpGs whose cancer index value is determined are located within at least DMR 252 defined by SEQ ID NO: 5252, and wherein when the cancer index for the individual is less than about 0.04 the individual is classified as not having CIN3 and/or cancer or as having a low risk of CIN3 and/or cancer development, and wherein the sensitivity of the assay is at least 68.00% and the specificity of the assay is at least 75.00%, preferably wherein the panel of one or more CpGs comprises at least eight CpG from DMR 252, and more preferably wherein the cancer index value is the mean β-value for the CpGs denoted by [[CG]] in SEQ ID NO: 5252;
[1492] 505. CpGs whose cancer index value is determined are located within at least DMR 253 defined by SEQ ID NO: 5253, and wherein when the cancer index for the individual is about 0.018 or more the individual is classified as having CIN3 and/or cancer or as having a high risk of CIN3 and/or cancer development, and wherein the sensitivity of the assay is at least 66.00% and the specificity of the assay is at least 75.00%, preferably wherein the panel of one or more CpGs comprises at least three CpG from DMR 253, and more preferably wherein the cancer index value is the mean β-value for the CpGs denoted by [[CG]] in SEQ ID NO: 5253;
[1493] 506. CpGs whose cancer index value is determined are located within at least DMR 253 defined by SEQ ID NO: 5253, and wherein when the cancer index for the individual is less than about 0.018 the individual is classified as not having CIN3 and/or cancer or as having a low risk of CIN3 and/or cancer development, and wherein the sensitivity of the assay is at least 66.00% and the specificity of the assay is at least 75.00%, preferably wherein the panel of one or more CpGs comprises at least three CpG from DMR 253, and more preferably wherein the cancer index value is the mean β-value for the CpGs denoted by [[CG]] in SEQ ID NO: 5253;
[1494] 507. CpGs whose cancer index value is determined are located within at least DMR 254 defined by SEQ ID NO: 5254, and wherein when the cancer index for the individual is about 0.026 or more the individual is classified as having CIN3 and/or cancer or as having a high risk of CIN3 and/or cancer development, and wherein the sensitivity of the assay is at least 72.00% and the specificity of the assay is at least 75.00%, preferably wherein the panel of one or more CpGs comprises at least six CpG from DMR 254, and more preferably wherein the cancer index value is the mean β-value for the CpGs denoted by [[CG]] in SEQ ID NO: 5254;
[1495] 508. CpGs whose cancer index value is determined are located within at least DMR 254 defined by SEQ ID NO: 5254, and wherein when the cancer index for the individual is less than about 0.026 the individual is classified as not having CIN3 and/or cancer or as having a low risk of CIN3 and/or cancer development, and wherein the sensitivity of the assay is at least 72.00% and the specificity of the assay is at least 75.00%, preferably wherein the panel of one or more CpGs comprises at least six CpG from DMR 254, and more preferably wherein the cancer index value is the mean β-value for the CpGs denoted by [[CG]] in SEQ ID NO: 5254;
[1496] 509. CpGs whose cancer index value is determined are located within at least DMR 255 defined by SEQ ID NO: 5255, and wherein when the cancer index for the individual is about 0.026 or more the individual is classified as having CIN3 and/or cancer or as having a high risk of CIN3 and/or cancer development, and wherein the sensitivity of the assay is at least 72.00% and the specificity of the assay is at least 75.00%, preferably wherein the panel of one or more CpGs comprises at least six CpG from DMR 255, and more preferably wherein the cancer index value is the mean β-value for the CpGs denoted by [[CG]] in SEQ ID NO: 5255;
[1497] 510. CpGs whose cancer index value is determined are located within at least DMR 255 defined by SEQ ID NO: 5255, and wherein when the cancer index for the individual is less than about 0.026 the individual is classified as not having CIN3 and/or cancer or as having a low risk of CIN3 and/or cancer development, and wherein the sensitivity of the assay is at least 72.00% and the specificity of the assay is at least 75.00%, preferably wherein the panel of one or more CpGs comprises at least six CpG from DMR 255, and more preferably wherein the cancer index value is the mean β-value for the CpGs denoted by [[CG]] in SEQ ID NO: 5255;
[1498] 511. CpGs whose cancer index value is determined are located within at least DMR 256 defined by SEQ ID NO: 5256, and wherein when the cancer index for the individual is about 0.051 or more the individual is classified as having CIN3 and/or cancer or as having a high risk of CIN3 and/or cancer development, and wherein the sensitivity of the assay is at least 69.00% and the specificity of the assay is at least 75.00%, preferably wherein the panel of one or more CpGs comprises at least three CpG from DMR 256, and more preferably wherein the cancer index value is the mean β-value for the CpGs denoted by [[CG]] in SEQ ID NO: 5256;
[1499] 512. CpGs whose cancer index value is determined are located within at least DMR 256 defined by SEQ ID NO: 5256, and wherein when the cancer index for the individual is less than about 0.051 the individual is classified as not having CIN3 and/or cancer or as having a low risk of CIN3 and/or cancer development, and wherein the sensitivity of the assay is at least 69.00% and the specificity of the assay is at least 75.00%, preferably wherein the panel of one or more CpGs comprises at least three CpG from DMR 256, and more preferably wherein the cancer index value is the mean β-value for the CpGs denoted by [[CG]] in SEQ ID NO: 5256;
[1500] 513. CpGs whose cancer index value is determined are located within at least DMR 257 defined by SEQ ID NO: 5257, and wherein when the cancer index for the individual is about 0.051 or more the individual is classified as having CIN3 and/or cancer or as having a high risk of CIN3 and/or cancer development, and wherein the sensitivity of the assay is at least 69.00% and the specificity of the assay is at least 75.00%, preferably wherein the panel of one or more CpGs comprises at least three CpG from DMR 257, and more preferably wherein the cancer index value is the mean β-value for the CpGs denoted by [[CG]] in SEQ ID NO: 5257;
[1501] 514. CpGs whose cancer index value is determined are located within at least DMR 257 defined by SEQ ID NO: 5257, and wherein when the cancer index for the individual is less than about 0.051 the individual is classified as not having CIN3 and/or cancer or as having a low risk of CIN3 and/or cancer development, and wherein the sensitivity of the assay is at least 69.00% and the specificity of the assay is at least 75.00%, preferably wherein the panel of one or more CpGs comprises at least three CpG from DMR 257, and more preferably wherein the cancer index value is the mean β-value for the CpGs denoted by [[CG]] in SEQ ID NO: 5257;
[1502] 515. CpGs whose cancer index value is determined are located within at least DMR 258 defined by SEQ ID NO: 5258, and wherein when the cancer index for the individual is about 0.051 or more the individual is classified as having CIN3 and/or cancer or as having a high risk of CIN3 and/or cancer development, and wherein the sensitivity of the assay is at least 70.00% and the specificity of the assay is at least 75.00%, preferably wherein the panel of one or more CpGs comprises at least two CpG from DMR 258, and more preferably wherein the cancer index value is the mean β-value for the CpGs denoted by [[CG]] in SEQ ID NO: 5258;
[1503] 516. CpGs whose cancer index value is determined are located within at least DMR 258 defined by SEQ ID NO: 5258, and wherein when the cancer index for the individual is less than about 0.051 the individual is classified as not having CIN3 and/or cancer or as having a low risk of CIN3 and/or cancer development, and wherein the sensitivity of the assay is at least 70.00% and the specificity of the assay is at least 75.00%, preferably wherein the panel of one or more CpGs comprises at least two CpG from DMR 258, and more preferably wherein the cancer index value is the mean β-value for the CpGs denoted by [[CG]] in SEQ ID NO: 5258;
[1504] 517. CpGs whose cancer index value is determined are located within at least DMR 259 defined by SEQ ID NO: 5259, and wherein when the cancer index for the individual is about 0.091 or more the individual is classified as having CIN3 and/or cancer or as having a high risk of CIN3 and/or cancer development, and wherein the sensitivity of the assay is at least 72.00% and the specificity of the assay is at least 75.00%, preferably wherein the panel of one or more CpGs comprises at least two CpG from DMR 259, and more preferably wherein the cancer index value is the mean β-value for the CpGs denoted by [[CG]] in SEQ ID NO: 5259;
[1505] 518. CpGs whose cancer index value is determined are located within at least DMR 259 defined by SEQ ID NO: 5259, and wherein when the cancer index for the individual is less than about 0.091 the individual is classified as not having CIN3 and/or cancer or as having a low risk of CIN3 and/or cancer development, and wherein the sensitivity of the assay is at least 72.00% and the specificity of the assay is at least 75.00%, preferably wherein the panel of one or more CpGs comprises at least two CpG from DMR 259, and more preferably wherein the cancer index value is the mean β-value for the CpGs denoted by [[CG]] in SEQ ID NO: 5259;
[1506] 519. CpGs whose cancer index value is determined are located within at least DMR 260 defined by SEQ ID NO: 5260, and wherein when the cancer index for the individual is about 0.044 or more the individual is classified as having CIN3 and/or cancer or as having a high risk of CIN3 and/or cancer development, and wherein the sensitivity of the assay is at least 70.00% and the specificity of the assay is at least 75.00%, preferably wherein the panel of one or more CpGs comprises at least seven CpG from DMR 260, and more preferably wherein the cancer index value is the mean β-value for the CpGs denoted by [[CG]] in SEQ ID NO: 5260;
[1507] 520. CpGs whose cancer index value is determined are located within at least DMR 260 defined by SEQ ID NO: 5260, and wherein when the cancer index for the individual is less than about 0.044 the individual is classified as not having CIN3 and/or cancer or as having a low risk of CIN3 and/or cancer development, and wherein the sensitivity of the assay is at least 70.00% and the specificity of the assay is at least 75.00%, preferably wherein the panel of one or more CpGs comprises at least seven CpG from DMR 260, and more preferably wherein the cancer index value is the mean β-value for the CpGs denoted by [[CG]] in SEQ ID NO: 5260;
[1508] 521. CpGs whose cancer index value is determined are located within at least DMR 261 defined by SEQ ID NO: 5261, and wherein when the cancer index for the individual is about 0.051 or more the individual is classified as having CIN3 and/or cancer or as having a high risk of CIN3 and/or cancer development, and wherein the sensitivity of the assay is at least 70.00% and the specificity of the assay is at least 75.00%, preferably wherein the panel of one or more CpGs comprises at least two CpG from DMR 261, and more preferably wherein the cancer index value is the mean β-value for the CpGs denoted by [[CG]] in SEQ ID NO: 5261;
[1509] 522. CpGs whose cancer index value is determined are located within at least DMR 261 defined by SEQ ID NO: 5261, and wherein when the cancer index for the individual is less than about 0.051 the individual is classified as not having CIN3 and/or cancer or as having a low risk of CIN3 and/or cancer development, and wherein the sensitivity of the assay is at least 70.00% and the specificity of the assay is at least 75.00%, preferably wherein the panel of one or more CpGs comprises at least two CpG from DMR 261, and more preferably wherein the cancer index value is the mean β-value for the CpGs denoted by [[CG]] in SEQ ID NO: 5261;
[1510] 523. CpGs whose cancer index value is determined are located within at least DMR 262 defined by SEQ ID NO: 5262, and wherein when the cancer index for the individual is about 0.029 or more the individual is classified as having CIN3 and/or cancer or as having a high risk of CIN3 and/or cancer development, and wherein the sensitivity of the assay is at least 74.00% and the specificity of the assay is at least 75.00%, preferably wherein the panel of one or more CpGs comprises at least three CpG from DMR 262, and more preferably wherein the cancer index value is the mean β-value for the CpGs denoted by [[CG]] in SEQ ID NO: 5262;
[1511] 524. CpGs whose cancer index value is determined are located within at least DMR 262 defined by SEQ ID NO: 5262, and wherein when the cancer index for the individual is less than about 0.029 the individual is classified as not having CIN3 and/or cancer or as having a low risk of CIN3 and/or cancer development, and wherein the sensitivity of the assay is at least 74.00% and the specificity of the assay is at least 75.00%, preferably wherein the panel of one or more CpGs comprises at least three CpG from DMR 262, and more preferably wherein the cancer index value is the mean β-value for the CpGs denoted by [[CG]] in SEQ ID NO: 5262;
[1512] 525. CpGs whose cancer index value is determined are located within at least DMR 263 defined by SEQ ID NO: 5263, and wherein when the cancer index for the individual is about 0.039 or more the individual is classified as having CIN3 and/or cancer or as having a high risk of CIN3 and/or cancer development, and wherein the sensitivity of the assay is at least 72.00% and the specificity of the assay is at least 75.00%, preferably wherein the panel of one or more CpGs comprises at least four CpG from DMR 263, and more preferably wherein the cancer index value is the mean β-value for the CpGs denoted by [[CG]] in SEQ ID NO: 5263;
[1513] 526. CpGs whose cancer index value is determined are located within at least DMR 263 defined by SEQ ID NO: 5263, and wherein when the cancer index for the individual is less than about 0.039 the individual is classified as not having CIN3 and/or cancer or as having a low risk of CIN3 and/or cancer development, and wherein the sensitivity of the assay is at least 72.00% and the specificity of the assay is at least 75.00%, preferably wherein the panel of one or more CpGs comprises at least four CpG from DMR 263, and more preferably wherein the cancer index value is the mean β-value for the CpGs denoted by [[CG]] in SEQ ID NO: 5263;
[1514] 527. CpGs whose cancer index value is determined are located within at least DMR 264 defined by SEQ ID NO: 5264, and wherein when the cancer index for the individual is about 0.047 or more the individual is classified as having CIN3 and/or cancer or as having a high risk of CIN3 and/or cancer development, and wherein the sensitivity of the assay is at least 71.00% and the specificity of the assay is at least 75.00%, preferably wherein the panel of one or more CpGs comprises at least six CpG from DMR 264, and more preferably wherein the cancer index value is the mean β-value for the CpGs denoted by [[CG]] in SEQ ID NO: 5264;
[1515] 528. CpGs whose cancer index value is determined are located within at least DMR 264 defined by SEQ ID NO: 5264, and wherein when the cancer index for the individual is less than about 0.047 the individual is classified as not having CIN3 and/or cancer or as having a low risk of CIN3 and/or cancer development, and wherein the sensitivity of the assay is at least 71.00% and the specificity of the assay is at least 75.00%, preferably wherein the panel of one or more CpGs comprises at least six CpG from DMR 264, and more preferably wherein the cancer index value is the mean β-value for the CpGs denoted by [[CG]] in SEQ ID NO: 5264;
[1516] 529. CpGs whose cancer index value is determined are located within at least DMR 265 defined by SEQ ID NO: 5265, and wherein when the cancer index for the individual is about 0.046 or more the individual is classified as having CIN3 and/or cancer or as having a high risk of CIN3 and/or cancer development, and wherein the sensitivity of the assay is at least 71.00% and the specificity of the assay is at least 75.00%, preferably wherein the panel of one or more CpGs comprises at least three CpG from DMR 265, and more preferably wherein the cancer index value is the mean β-value for the CpGs denoted by [[CG]] in SEQ ID NO: 5265;
[1517] 530. CpGs whose cancer index value is determined are located within at least DMR 265 defined by SEQ ID NO: 5265, and wherein when the cancer index for the individual is less than about 0.046 the individual is classified as not having CIN3 and/or cancer or as having a low risk of CIN3 and/or cancer development, and wherein the sensitivity of the assay is at least 71.00% and the specificity of the assay is at least 75.00%, preferably wherein the panel of one or more CpGs comprises at least three CpG from DMR 265, and more preferably wherein the cancer index value is the mean β-value for the CpGs denoted by [[CG]] in SEQ ID NO: 5265;
[1518] 531. CpGs whose cancer index value is determined are located within at least DMR 266 defined by SEQ ID NO: 5266, and wherein when the cancer index for the individual is about 0.023 or more the individual is classified as having CIN3 and/or cancer or as having a high risk of CIN3 and/or cancer development, and wherein the sensitivity of the assay is at least 72.00% and the specificity of the assay is at least 75.00%, preferably wherein the panel of one or more CpGs comprises at least three CpG from DMR 266, and more preferably wherein the cancer index value is the mean β-value for the CpGs denoted by [[CG]] in SEQ ID NO: 5266;
[1519] 532. CpGs whose cancer index value is determined are located within at least DMR 266 defined by SEQ ID NO: 5266, and wherein when the cancer index for the individual is less than about 0.023 the individual is classified as not having CIN3 and/or cancer or as having a low risk of CIN3 and/or cancer development, and wherein the sensitivity of the assay is at least 72.00% and the specificity of the assay is at least 75.00%, preferably wherein the panel of one or more CpGs comprises at least three CpG from DMR 266, and more preferably wherein the cancer index value is the mean β-value for the CpGs denoted by [[CG]] in SEQ ID NO: 5266;
[1520] 533. CpGs whose cancer index value is determined are located within at least DMR 267 defined by SEQ ID NO: 5267, and wherein when the cancer index for the individual is about 0.047 or more the individual is classified as having CIN3 and/or cancer or as having a high risk of CIN3 and/or cancer development, and wherein the sensitivity of the assay is at least 71.00% and the specificity of the assay is at least 75.00%, preferably wherein the panel of one or more CpGs comprises at least six CpG from DMR 267, and more preferably wherein the cancer index value is the mean β-value for the CpGs denoted by [[CG]] in SEQ ID NO: 5267;
[1521] 534. CpGs whose cancer index value is determined are located within at least DMR 267 defined by SEQ ID NO: 5267, and wherein when the cancer index for the individual is less than about 0.047 the individual is classified as not having CIN3 and/or cancer or as having a low risk of CIN3 and/or cancer development, and wherein the sensitivity of the assay is at least 71.00% and the specificity of the assay is at least 75.00%, preferably wherein the panel of one or more CpGs comprises at least six CpG from DMR 267, and more preferably wherein the cancer index value is the mean β-value for the CpGs denoted by [[CG]] in SEQ ID NO: 5267;
[1522] 535. CpGs whose cancer index value is determined are located within at least DMR 268 defined by SEQ ID NO: 5268, and wherein when the cancer index for the individual is about 0.078 or more the individual is classified as having CIN3 and/or cancer or as having a high risk of CIN3 and/or cancer development, and wherein the sensitivity of the assay is at least 70.00% and the specificity of the assay is at least 75.00%, preferably wherein the panel of one or more CpGs comprises at least five CpG from DMR 268, and more preferably wherein the cancer index value is the mean β-value for the CpGs denoted by [[CG]] in SEQ ID NO: 5268;
[1523] 536. CpGs whose cancer index value is determined are located within at least DMR 268 defined by SEQ ID NO: 5268, and wherein when the cancer index for the individual is less than about 0.078 the individual is classified as not having CIN3 and/or cancer or as having a low risk of CIN3 and/or cancer development, and wherein the sensitivity of the assay is at least 70.00% and the specificity of the assay is at least 75.00%, DMR 268, and more preferably wherein the cancer index value is the mean β-value for the CpGs denoted by [[CG]] in SEQ ID NO: 5268;
[1524] 537. CpGs whose cancer index value is determined are located within at least DMR 269 defined by SEQ ID NO: 5269, and wherein when the cancer index for the individual is about 0.065 or more the individual is classified as having CIN3 and/or cancer or as having a high risk of CIN3 and/or cancer development, and wherein the sensitivity of the assay is at least 75.00% and the specificity of the assay is at least 75.00%, preferably wherein the panel of one or more CpGs comprises at least four CpG from DMR 269, and more preferably wherein the cancer index value is the mean β-value for the CpGs denoted by [[CG]] in SEQ ID NO: 5269;
[1525] 538. CpGs whose cancer index value is determined are located within at least DMR 269 defined by SEQ ID NO: 5269, and wherein when the cancer index for the individual is less than about 0.065 the individual is classified as not having CIN3 and/or cancer or as having a low risk of CIN3 and/or cancer development, and wherein the sensitivity of the assay is at least 75.00% and the specificity of the assay is at least 75.00%, preferably wherein the panel of one or more CpGs comprises at least four CpG from DMR 269, and more preferably wherein the cancer index value is the mean β-value for the CpGs denoted by [[CG]] in SEQ ID NO: 5269;
[1526] 539. CpGs whose cancer index value is determined are located within at least DMR 270 defined by SEQ ID NO: 5270, and wherein when the cancer index for the individual is about 0.023 or more the individual is classified as having CIN3 and/or cancer or as having a high risk of CIN3 and/or cancer development, and wherein the sensitivity of the assay is at least 72.00% and the specificity of the assay is at least 75.00%, preferably wherein the panel of one or more CpGs comprises at least three CpG from DMR 270, and more preferably wherein the cancer index value is the mean β-value for the CpGs denoted by [[CG]] in SEQ ID NO: 5270;
[1527] 540. CpGs whose cancer index value is determined are located within at least DMR 270 defined by SEQ ID NO: 5270, and wherein when the cancer index for the individual is less than about 0.023 or more the individual is classified as not having cancer or as having a high risk of cancer development, and wherein the sensitivity of the assay is at least 72.00% and the specificity of the assay is at least 75.00%, preferably wherein the panel of one or more CpGs comprises at least three CpG from DMR 270, and more preferably wherein the cancer index value is the mean β-value for the CpGs denoted by [[CG]] in SEQ ID NO: 5270;
[1528] 541. CpGs whose cancer index value is determined are located within at least DMR 271 defined by SEQ ID NO: 5271, and wherein when the cancer index for the individual is about 0.023 or more the individual is classified as having CIN3 and/or cancer or as having a high risk of CIN3 and/or cancer development, and wherein the sensitivity of the assay is at least 72.00% and the specificity of the assay is at least 75.00%, preferably wherein the panel of one or more CpGs comprises at least three CpG from DMR 271, and more preferably wherein the cancer index value is the mean β-value for the CpGs denoted by [[CG]] in SEQ ID NO: 5271;
[1529] 542. CpGs whose cancer index value is determined are located within at least DMR 271 defined by SEQ ID NO: 5271, and wherein when the cancer index for the individual is less than about 0.023 the individual is classified as not having CIN3 and/or cancer or as having a low risk of CIN3 and/or cancer development, and wherein the sensitivity of the assay is at least 72.00% and the specificity of the assay is at least 75.00%, preferably wherein the panel of one or more CpGs comprises at least three CpG from DMR 271, and more preferably wherein the cancer index value is the mean β-value for the CpGs denoted by [[CG]] in SEQ ID NO: 5271;
[1530] 543. CpGs whose cancer index value is determined are located within at least DMR 272 defined by SEQ ID NO: 5272, and wherein when the cancer index for the individual is about 0.051 or more the individual is classified as having CIN3 and/or cancer or as having a high risk of CIN3 and/or cancer development, and wherein the sensitivity of the assay is at least 69.00% and the specificity of the assay is at least 75.00%, preferably wherein the panel of one or more CpGs comprises at least seven CpG from DMR 272, and more preferably wherein the cancer index value is the mean β-value for the CpGs denoted by [[CG]] in SEQ ID NO: 5272;
[1531] 544. CpGs whose cancer index value is determined are located within at least DMR 272 defined by SEQ ID NO: 5272, and wherein when the cancer index for the individual is less than about 0.051 the individual is classified as not having CIN3 and/or cancer or as having a low risk of CIN3 and/or cancer development, and wherein the sensitivity of the assay is at least 69.00% and the specificity of the assay is at least 75.00%, preferably wherein the panel of one or more CpGs comprises at least seven CpG from DMR 272, and more preferably wherein the cancer index value is the mean β-value for the CpGs denoted by [[CG]] in SEQ ID NO: 5272;
[1532] 545. CpGs whose cancer index value is determined are located within at least DMR 273 defined by SEQ ID NO: 5273, and wherein when the cancer index for the individual is about 0.051 or more the individual is classified as having CIN3 and/or cancer or as having a high risk of CIN3 and/or cancer development, and wherein the sensitivity of the assay is at least 69.00% and the specificity of the assay is at least 75.00%, preferably wherein the panel of one or more CpGs comprises at least seven CpG from DMR 273, and more preferably wherein the cancer index value is the mean β-value for the CpGs denoted by [[CG]] in SEQ ID NO: 5273;
[1533] 546. CpGs whose cancer index value is determined are located within at least DMR 273 defined by SEQ ID NO: 5273, and wherein when the cancer index for the individual is less than about 0.051 the individual is classified as not having CIN3 and/or cancer or as having a low risk of CIN3 and/or cancer development, and wherein the sensitivity of the assay is at least 69.00% and the specificity of the assay is at least 75.00%, preferably wherein the panel of one or more CpGs comprises at least seven CpG from DMR 273, and more preferably wherein the cancer index value is the mean β-value for the CpGs denoted by [[CG]] in SEQ ID NO: 5273;
[1534] 547. CpGs whose cancer index value is determined are located within at least DMR 274 defined by SEQ ID NO: 5274, and wherein when the cancer index for the individual is about 0.068 or more the individual is classified as having CIN3 and/or cancer or as having a high risk of CIN3 and/or cancer development, and wherein the sensitivity of the assay is at least 68.00% and the specificity of the assay is at least 75.00%, preferably wherein the panel of one or more CpGs comprises at least four CpG from DMR 274, and more preferably wherein the cancer index value is the mean β-value for the CpGs denoted by [[CG]] in SEQ ID NO: 5274;
[1535] 548. CpGs whose cancer index value is determined are located within at least DMR 274 defined by SEQ ID NO: 5274, and wherein when the cancer index for the individual is less than about 0.068 the individual is classified as not having CIN3 and/or cancer or as having a low risk of CIN3 and/or cancer development, and wherein the sensitivity of the assay is at least 68.00% and the specificity of the assay is at least 75.00%, preferably wherein the panel of one or more CpGs comprises at least four CpG from DMR 274, and more preferably wherein the cancer index value is the mean β-value for the CpGs denoted by [[CG]] in SEQ ID NO: 5274;
[1536] 549. CpGs whose cancer index value is determined are located within at least DMR 275 defined by SEQ ID NO: 5275, and wherein when the cancer index for the individual is about 0.057 or more the individual is classified as having CIN3 and/or cancer or as having a high risk of CIN3 and/or cancer development, and wherein the sensitivity of the assay is at least 72.00% and the specificity of the assay is at least 75.00%, preferably wherein the panel of one or more CpGs comprises at least one CpG from DMR 275, and more preferably wherein the cancer index value is the mean β-value for the CpGs denoted by [[CG]] in SEQ ID NO: 5275;
[1537] 550. CpGs whose cancer index value is determined are located within at least DMR 275 defined by SEQ ID NO: 5275, and wherein when the cancer index for the individual is less than about 0.057 the individual is classified as not having CIN3 and/or cancer or as having a low risk of CIN3 and/or cancer development, and wherein the sensitivity of the assay is at least 72.00% and the specificity of the assay is at least 75.00%, preferably wherein the panel of one or more CpGs comprises at least one CpG from DMR 275, and more preferably wherein the cancer index value is the mean β-value for the CpGs denoted by [[CG]] in SEQ ID NO: 5275;
[1538] 551. CpGs whose cancer index value is determined are located within at least DMR 276 defined by SEQ ID NO: 5276, and wherein when the cancer index for the individual is about 0.068 or more the individual is classified as having CIN3 and/or cancer or as having a high risk of CIN3 and/or cancer development, and wherein the sensitivity of the assay is at least 68.00% and the specificity of the assay is at least 75.00%, preferably wherein the panel of one or more CpGs comprises at least four CpG from DMR 276, and more preferably wherein the cancer index value is the mean β-value for the CpGs denoted by [[CG]] in SEQ ID NO: 5276;
[1539] 552. CpGs whose cancer index value is determined are located within at least DMR 276 defined by SEQ ID NO: 5276, and wherein when the cancer index for the individual is less than about 0.068 the individual is classified as not having CIN3 and/or cancer or as having a low risk of CIN3 and/or cancer development, and wherein the sensitivity of the assay is at least 68.00% and the specificity of the assay is at least 75.00%, preferably wherein the panel of one or more CpGs comprises at least four CpG from DMR 276, and more preferably wherein the cancer index value is the mean β-value for the CpGs denoted by [[CG]] in SEQ ID NO: 5276;
[1540] 553. CpGs whose cancer index value is determined are located within at least DMR 277 defined by SEQ ID NO: 5277, and wherein when the cancer index for the individual is about 0.068 or more the individual is classified as having CIN3 and/or cancer or as having a high risk of CIN3 and/or cancer development, and wherein the sensitivity of the assay is at least 68.00% and the specificity of the assay is at least 75.00%, preferably wherein the panel of one or more CpGs comprises at least four CpG from DMR 277, and more preferably wherein the cancer index value is the mean β-value for the CpGs denoted by [[CG]] in SEQ ID NO: 5277;
[1541] 554. CpGs whose cancer index value is determined are located within at least DMR 277 defined by SEQ ID NO: 5277, and wherein when the cancer index for the individual is less than about 0.068 the individual is classified as not having CIN3 and/or cancer or as having a low risk of CIN3 and/or cancer development, and wherein the sensitivity of the assay is at least 68.00% and the specificity of the assay is at least 75.00%, preferably wherein the panel of one or more CpGs comprises at least four CpG from DMR 277, and more preferably wherein the cancer index value is the mean β-value for the CpGs denoted by [[CG]] in SEQ ID NO: 5277;
[1542] 555. CpGs whose cancer index value is determined are located within at least DMR 278 defined by SEQ ID NO: 5278, and wherein when the cancer index for the individual is about 0.035 or more the individual is classified as having CIN3 and/or cancer or as having a high risk of CIN3 and/or cancer development, and wherein the sensitivity of the assay is at least 71.00% and the specificity of the assay is at least 75.00%, preferably wherein the panel of one or more CpGs comprises at least six CpG from DMR 278, and more preferably wherein the cancer index value is the mean β-value for the CpGs denoted by [[CG]] in SEQ ID NO: 5278;
[1543] 556. CpGs whose cancer index value is determined are located within at least DMR 278 defined by SEQ ID NO: 5278, and wherein when the cancer index for the individual is less than about 0.035 the individual is classified as not having CIN3 and/or cancer or as having a low risk of CIN3 and/or cancer development, and wherein the sensitivity of the assay is at least 71.00% and the specificity of the assay is at least 75.00%, preferably wherein the panel of one or more CpGs comprises at least six CpG from DMR 278, and more preferably wherein the cancer index value is the mean β-value for the CpGs denoted by [[CG]] in SEQ ID NO: 5278;
[1544] 557. CpGs whose cancer index value is determined are located within at least DMR 279 defined by SEQ ID NO: 5279, and wherein when the cancer index for the individual is about 0.039 or more the individual is classified as having CIN3 and/or cancer or as having a high risk of CIN3 and/or cancer development, and wherein the sensitivity of the assay is at least 74.00% and the specificity of the assay is at least 75.00%, preferably wherein the panel of one or more CpGs comprises at least seven CpG from DMR 279, and more preferably wherein the cancer index value is the mean β-value for the CpGs denoted by [[CG]] in SEQ ID NO: 5279;
[1545] 558. CpGs whose cancer index value is determined are located within at least DMR 279 defined by SEQ ID NO: 5279, and wherein when the cancer index for the individual is less than about 0.039 the individual is classified as not having CIN3 and/or cancer or as having a low risk of CIN3 and/or cancer development, and wherein the sensitivity of the assay is at least 74.00% and the specificity of the assay is at least 75.00%, preferably wherein the panel of one or more CpGs comprises at least seven CpG from DMR 279, and more preferably wherein the cancer index value is the mean β-value for the CpGs denoted by [[CG]] in SEQ ID NO: 5279;
[1546] 559. CpGs whose cancer index value is determined are located within at least DMR 280 defined by SEQ ID NO: 5280, and wherein when the cancer index for the individual is about 0.068 or more the individual is classified as having CIN3 and/or cancer or as having a high risk of CIN3 and/or cancer development, and wherein the sensitivity of the assay is at least 68.00% and the specificity of the assay is at least 75.00%, DMR 280, and more preferably wherein the cancer index value is the mean β-value for the CpGs denoted by [[CG]] in SEQ ID NO: 5280;
[1547] 560. CpGs whose cancer index value is determined are located within at least DMR 280 defined by SEQ ID NO: 5280, and wherein when the cancer index for the individual is less than about 0.068 the individual is classified as not having CIN3 and/or cancer or as having a low risk of CIN3 and/or cancer development, and wherein the sensitivity of the assay is at least 68.00% and the specificity of the assay is at least 75.00%, preferably wherein the panel of one or more CpGs comprises at least four CpG from DMR 280, and more preferably wherein the cancer index value is the mean β-value for the CpGs denoted by [[CG]] in SEQ ID NO: 5280;
[1548] 561. CpGs whose cancer index value is determined are located within at least DMR 281 defined by SEQ ID NO: 5281, and wherein when the cancer index for the individual is about 0.039 or more the individual is classified as having CIN3 and/or cancer or as having a high risk of CIN3 and/or cancer development, and wherein the sensitivity of the assay is at least 74.00% and the specificity of the assay is at least 75.00%, preferably wherein the panel of one or more CpGs comprises at least seven CpG from DMR 281, and more preferably wherein the cancer index value is the mean β-value for the CpGs denoted by [[CG]] in SEQ ID NO: 5281;
[1549] 562. CpGs whose cancer index value is determined are located within at least DMR 281 defined by SEQ ID NO: 5281, and wherein when the cancer index for the individual is less than about 0.039 the individual is classified as not having CIN3 and/or cancer or as having a low risk of CIN3 and/or cancer development, and wherein the sensitivity of the assay is at least 74.00% and the specificity of the assay is at least 75.00%, preferably wherein the panel of one or more CpGs comprises at least seven CpG from DMR 281, and more preferably wherein the cancer index value is the mean β-value for the CpGs denoted by [[CG]] in SEQ ID NO: 5281;
[1550] 563. CpGs whose cancer index value is determined are located within at least DMR 282 defined by SEQ ID NO: 5282, and wherein when the cancer index for the individual is about 0.028 or more the individual is classified as having CIN3 and/or cancer or as having a high risk of CIN3 and/or cancer development, and wherein the sensitivity of the assay is at least 68.00% and the specificity of the assay is at least 75.00%, preferably wherein the panel of one or more CpGs comprises at least eight CpG from DMR 282, and more preferably wherein the cancer index value is the mean β-value for the CpGs denoted by [[CG]] in SEQ ID NO: 5282;
[1551] 564. CpGs whose cancer index value is determined are located within at least DMR 282 defined by SEQ ID NO: 5282, and wherein when the cancer index for the individual is less than about 0.028 the individual is classified as not having CIN3 and/or cancer or as having a low risk of CIN3 and/or cancer development, and wherein the sensitivity of the assay is at least 68.00% and the specificity of the assay is at least 75.00%, preferably wherein the panel of one or more CpGs comprises at least eight CpG from DMR 282, and more preferably wherein the cancer index value is the mean β-value for the CpGs denoted by [[CG]] in SEQ ID NO: 5282;
[1552] 565. CpGs whose cancer index value is determined are located within at least DMR 283 defined by SEQ ID NO: 5283, and wherein when the cancer index for the individual is about 0.042 or more the individual is classified as having CIN3 and/or cancer or as having a high risk of CIN3 and/or cancer development, and wherein the sensitivity of the assay is at least 74.00% and the specificity of the assay is at least 75.00%, preferably wherein the panel of one or more CpGs comprises at least four CpG from DMR 283, and more preferably wherein the cancer index value is the mean β-value for the CpGs denoted by [[CG]] in SEQ ID NO: 5283;
[1553] 566. CpGs whose cancer index value is determined are located within at least DMR 283 defined by SEQ ID NO: 5283, and wherein when the cancer index for the individual is less than about 0.042 the individual is classified as not having CIN3 and/or cancer or as having a low risk of CIN3 and/or cancer development, and wherein the sensitivity of the assay is at least 74.00% and the specificity of the assay is at least 75.00%, preferably wherein the panel of one or more CpGs comprises at least four CpG from DMR 283, and more preferably wherein the cancer index value is the mean β-value for the CpGs denoted by [[CG]] in SEQ ID NO: 5283;
[1554] 567. CpGs whose cancer index value is determined are located within at least DMR 284 defined by SEQ ID NO: 5284, and wherein when the cancer index for the individual is about 0.032 or more the individual is classified as having CIN3 and/or cancer or as having a high risk of CIN3 and/or cancer development, and wherein the sensitivity of the assay is at least 68.00% and the specificity of the assay is at least 75.00%, preferably wherein the panel of one or more CpGs comprises at least five CpG from DMR 284, and more preferably wherein the cancer index value is the mean β-value for the CpGs denoted by [[CG]] in SEQ ID NO: 5284;
[1555] 568. CpGs whose cancer index value is determined are located within at least DMR 284 defined by SEQ ID NO: 5284, and wherein when the cancer index for the individual is less than about 0.032 the individual is classified as not having CIN3 and/or cancer or as having a low risk of CIN3 and/or cancer development, and wherein the sensitivity of the assay is at least 68.00% and the specificity of the assay is at least 75.00%, preferably wherein the panel of one or more CpGs comprises at least five CpG from DMR 284, and more preferably wherein the cancer index value is the mean β-value for the CpGs denoted by [[CG]] in SEQ ID NO: 5284;
[1556] 569. CpGs whose cancer index value is determined are located within at least DMR 285 defined by SEQ ID NO: 5285, and wherein when the cancer index for the individual is about 0.091 or more the individual is classified as having CIN3 and/or cancer or as having a high risk of CIN3 and/or cancer development, and wherein the sensitivity of the assay is at least 69.00% and the specificity of the assay is at least 75.00%, preferably wherein the panel of one or more CpGs comprises at least two CpG from DMR 285, and more preferably wherein the cancer index value is the mean β-value for the CpGs denoted by [[CG]] in SEQ ID NO: 5285;
[1557] 570. CpGs whose cancer index value is determined are located within at least DMR 285 defined by SEQ ID NO: 5285, and wherein when the cancer index for the individual is less than about 0.091 the individual is classified as not having CIN3 and/or cancer or as having a low risk of CIN3 and/or cancer development, and wherein the sensitivity of the assay is at least 69.00% and the specificity of the assay is at least 75.00%, preferably wherein the panel of one or more CpGs comprises at least two CpG from DMR 285, and more preferably wherein the cancer index value is the mean β-value for the CpGs denoted by [[CG]] in SEQ ID NO: 5285;
[1558] 571. CpGs whose cancer index value is determined are located within at least DMR 286 defined by SEQ ID NO: 5286, and wherein when the cancer index for the individual is about 0.069 or more the individual is classified as having CIN3 and/or cancer or as having a high risk of CIN3 and/or cancer development, and wherein the sensitivity of the assay is at least 69.00% and the specificity of the assay is at least 75.00%, preferably wherein the panel of one or more CpGs comprises at least two CpG from DMR 286, and more preferably wherein the cancer index value is the mean β-value for the CpGs denoted by [[CG]] in SEQ ID NO: 5286;
[1559] 572. CpGs whose cancer index value is determined are located within at least DMR 286 defined by SEQ ID NO: 5286, and wherein when the cancer index for the individual is less than about 0.069 the individual is classified as not having CIN3 and/or cancer or as having a low risk of CIN3 and/or cancer development, and wherein the sensitivity of the assay is at least 69.00% and the specificity of the assay is at least 75.00%, preferably wherein the panel of one or more CpGs comprises at least two CpG from DMR 286, and more preferably wherein the cancer index value is the mean β-value for the CpGs denoted by [[CG]] in SEQ ID NO: 5286;
[1560] 573. CpGs whose cancer index value is determined are located within at least DMR 287 defined by SEQ ID NO: 5287, and wherein when the cancer index for the individual is about 0.091 or more the individual is classified as having CIN3 and/or cancer or as having a high risk of CIN3 and/or cancer development, and wherein the sensitivity of the assay is at least 69.00% and the specificity of the assay is at least 75.00%, preferably wherein the panel of one or more CpGs comprises at least two CpG from DMR 287, and more preferably wherein the cancer index value is the mean β-value for the CpGs denoted by [[CG]] in SEQ ID NO: 5287;
[1561] 574. CpGs whose cancer index value is determined are located within at least DMR 287 defined by SEQ ID NO: 5287, and wherein when the cancer index for the individual is less than about 0.091 the individual is classified as not having CIN3 and/or cancer or as having a low risk of CIN3 and/or cancer development, and wherein the sensitivity of the assay is at least 69.00% and the specificity of the assay is at least 75.00%, preferably wherein the panel of one or more CpGs comprises at least two CpG from DMR 287, and more preferably wherein the cancer index value is the mean β-value for the CpGs denoted by [[CG]] in SEQ ID NO: 5287;
[1562] 575. CpGs whose cancer index value is determined are located within at least DMR 288 defined by SEQ ID NO: 5288, and wherein when the cancer index for the individual is about 0.061 or more the individual is classified as having CIN3 and/or cancer or as having a high risk of CIN3 and/or cancer development, and wherein the sensitivity of the assay is at least 64.00% and the specificity of the assay is at least 75.00%, preferably wherein the panel of one or more CpGs comprises at least seven CpG from DMR 288, and more preferably wherein the cancer index value is the mean β-value for the CpGs denoted by [[CG]] in SEQ ID NO: 5288;
[1563] 576. CpGs whose cancer index value is determined are located within at least DMR 288 defined by SEQ ID NO: 5288, and wherein when the cancer index for the individual is less than about 0.061 the individual is classified as not having CIN3 and/or cancer or as having a low risk of CIN3 and/or cancer development, and wherein the sensitivity of the assay is at least 64.00% and the specificity of the assay is at least 75.00%, preferably wherein the panel of one or more CpGs comprises at least seven CpG from DMR 288, and more preferably wherein the cancer index value is the mean β-value for the CpGs denoted by [[CG]] in SEQ ID NO: 5288;
[1564] 577. CpGs whose cancer index value is determined are located within at least DMR 289 defined by SEQ ID NO: 5289, and wherein when the cancer index for the individual is about 0.033 or more the individual is classified as having CIN3 and/or cancer or as having a high risk of CIN3 and/or cancer development, and wherein the sensitivity of the assay is at least 68.00% and the specificity of the assay is at least 75.00%, preferably wherein the panel of one or more CpGs comprises at least seven CpG from DMR 289, and more preferably wherein the cancer index value is the mean β-value for the CpGs denoted by [[CG]] in SEQ ID NO: 5289;
[1565] 578. CpGs whose cancer index value is determined are located within at least DMR 289 defined by SEQ ID NO: 5289, and wherein when the cancer index for the individual is less than about 0.033 the individual is classified as not having CIN3 and/or cancer or as having a low risk of CIN3 and/or cancer development, and wherein the sensitivity of the assay is at least 68.00% and the specificity of the assay is at least 75.00%, preferably wherein the panel of one or more CpGs comprises at least seven CpG from DMR 289, and more preferably wherein the cancer index value is the mean β-value for the CpGs denoted by [[CG]] in SEQ ID NO: 5289;
[1566] 579. CpGs whose cancer index value is determined are located within at least DMR 290 defined by SEQ ID NO: 5290, and wherein when the cancer index for the individual is about 0.045 or more the individual is classified as having CIN3 and/or cancer or as having a high risk of CIN3 and/or cancer development, and wherein the sensitivity of the assay is at least 67.00% and the specificity of the assay is at least 75.00%, preferably wherein the panel of one or more CpGs comprises at least two CpG from DMR 290, and more preferably wherein the cancer index value is the mean β-value for the CpGs denoted by [[CG]] in SEQ ID NO: 5290;
[1567] 580. CpGs whose cancer index value is determined are located within at least DMR 290 defined by SEQ ID NO: 5290, and wherein when the cancer index for the individual is less than about 0.045 the individual is classified as not having CIN3 and/or cancer or as having a low risk of CIN3 and/or cancer development, and wherein the sensitivity of the assay is at least 67.00% and the specificity of the assay is at least 75.00%, preferably wherein the panel of one or more CpGs comprises at least two CpG from DMR 290, and more preferably wherein the cancer index value is the mean β-value for the CpGs denoted by [[CG]] in SEQ ID NO: 5290;
[1568] 581. CpGs whose cancer index value is determined are located within at least DMR 291 defined by SEQ ID NO: 5291, and wherein when the cancer index for the individual is about 0.056 or more the individual is classified as having CIN3 and/or cancer or as having a high risk of CIN3 and/or cancer development, and wherein the sensitivity of the assay is at least 64.00% and the specificity of the assay is at least 75.00%, preferably wherein the panel of one or more CpGs comprises at least nine CpG from DMR 291, and more preferably wherein the cancer index value is the mean β-value for the CpGs denoted by [[CG]] in SEQ ID NO: 5291;
[1569] 582. CpGs whose cancer index value is determined are located within at least DMR 291 defined by SEQ ID NO: 5291, and wherein when the cancer index for the individual is less than about 0.056 the individual is classified as not having CIN3 and/or cancer or as having a low risk of CIN3 and/or cancer development, and wherein the sensitivity of the assay is at least 64.00% and the specificity of the assay is at least 75.00%, preferably wherein the panel of one or more CpGs comprises at least nine CpG from DMR 291, and more preferably wherein the cancer index value is the mean β-value for the CpGs denoted by [[CG]] in SEQ ID NO: 5291;
[1570] 583. CpGs whose cancer index value is determined are located within at least DMR 292 defined by SEQ ID NO: 5292, and wherein when the cancer index for the individual is about 0.041 or more the individual is classified as having CIN3 and/or cancer or as having a high risk of CIN3 and/or cancer development, and wherein the sensitivity of the assay is at least 72.00% and the specificity of the assay is at least 75.00%, preferably wherein the panel of one or more CpGs comprises at least six CpG from DMR 292, and more preferably wherein the cancer index value is the mean β-value for the CpGs denoted by [[CG]] in SEQ ID NO: 5292;
[1571] 584. CpGs whose cancer index value is determined are located within at least DMR 292 defined by SEQ ID NO: 5292, and wherein when the cancer index for the individual is less than about 0.041 the individual is classified as not having CIN3 and/or cancer or as having a low risk of CIN3 and/or cancer development, and wherein the sensitivity of the assay is at least 72.00% and the specificity of the assay is at least 75.00%, preferably wherein the panel of one or more CpGs comprises at least six CpG from DMR 292, and more preferably wherein the cancer index value is the mean β-value for the CpGs denoted by [[CG]] in SEQ ID NO: 5292;
[1572] 585. CpGs whose cancer index value is determined are located within at least DMR 293 defined by SEQ ID NO: 5293, and wherein when the cancer index for the individual is about 0.033 or more the individual is classified as having CIN3 and/or cancer or as having a high risk of CIN3 and/or cancer development, and wherein the sensitivity of the assay is at least 71.00% and the specificity of the assay is at least 75.00%, preferably wherein the panel of one or more CpGs comprises at least twenty-one CpG from DMR 293, and more preferably wherein the cancer index value is the mean β-value for the CpGs denoted by [[CG]] in SEQ ID NO: 5293;
[1573] 586. CpGs whose cancer index value is determined are located within at least DMR 293 defined by SEQ ID NO: 5293, and wherein when the cancer index for the individual is less than about 0.033 the individual is classified as not having CIN3 and/or cancer or as having a low risk of CIN3 and/or cancer development, and wherein the sensitivity of the assay is at least 71.00% and the specificity of the assay is at least 75.00%, preferably wherein the panel of one or more CpGs comprises at least twenty-one CpG from DMR 293, and more preferably wherein the cancer index value is the mean β-value for the CpGs denoted by [[CG]] in SEQ ID NO: 5293;
[1574] 587. CpGs whose cancer index value is determined are located within at least DMR 294 defined by SEQ ID NO: 5294, and wherein when the cancer index for the individual is about 0.056 or more the individual is classified as having CIN3 and/or cancer or as having a high risk of CIN3 and/or cancer development, and wherein the sensitivity of the assay is at least 74.00% and the specificity of the assay is at least 75.00%, preferably wherein the panel of one or more CpGs comprises at least seven CpG from DMR 294, and more preferably wherein the cancer index value is the mean β-value for the CpGs denoted by [[CG]] in SEQ ID NO: 5294;
[1575] 588. CpGs whose cancer index value is determined are located within at least DMR 294 defined by SEQ ID NO: 5294, and wherein when the cancer index for the individual is less than about 0.056 the individual is classified as not having CIN3 and/or cancer or as having a low risk of CIN3 and/or cancer development, and wherein the sensitivity of the assay is at least 74.00% and the specificity of the assay is at least 75.00%, preferably wherein the panel of one or more CpGs comprises at least seven CpG from DMR 294, and more preferably wherein the cancer index value is the mean β-value for the CpGs denoted by [[CG]] in SEQ ID NO: 5294;
[1576] 589. CpGs whose cancer index value is determined are located within at least DMR 295 defined by SEQ ID NO: 5295, and wherein when the cancer index for the individual is about 0.072 or more the individual is classified as having CIN3 and/or cancer or as having a high risk of CIN3 and/or cancer development, and wherein the sensitivity of the assay is at least 71.00% and the specificity of the assay is at least 75.00%, preferably wherein the panel of one or more CpGs comprises at least eight CpG from DMR 295, and more preferably wherein the cancer index value is the mean β-value for the CpGs denoted by [[CG]] in SEQ ID NO: 5295;
[1577] 590. CpGs whose cancer index value is determined are located within at least DMR 295 defined by SEQ ID NO: 5295, and wherein when the cancer index for the individual is less than about 0.072 the individual is classified as not having CIN3 and/or cancer or as having a low risk of CIN3 and/or cancer development, and wherein the sensitivity of the assay is at least 71.00% and the specificity of the assay is at least 75.00%, preferably wherein the panel of one or more CpGs comprises at least eight CpG from DMR 295, and more preferably wherein the cancer index value is the mean β-value for the CpGs denoted by [[CG]] in SEQ ID NO: 5295;
[1578] 591. CpGs whose cancer index value is determined are located within at least DMR 296 defined by SEQ ID NO: 5296, and wherein when the cancer index for the individual is about 0.028 or more the individual is classified as having CIN3 and/or cancer or as having a high risk of CIN3 and/or cancer development, and wherein the sensitivity of the assay is at least 64.00% and the specificity of the assay is at least 75.00%, preferably wherein the panel of one or more CpGs comprises at least five CpG from DMR 296, and more preferably wherein the cancer index value is the mean β-value for the CpGs denoted by [[CG]] in SEQ ID NO: 5296;
[1579] 592. CpGs whose cancer index value is determined are located within at least DMR 296 defined by SEQ ID NO: 5296, and wherein when the cancer index for the individual is less than about 0.028 the individual is classified as not having CIN3 and/or cancer or as having a low risk of CIN3 and/or cancer development, and wherein the sensitivity of the assay is at least 64.00% and the specificity of the assay is at least 75.00%, preferably wherein the panel of one or more CpGs comprises at least five CpG from DMR 296, and more preferably wherein the cancer index value is the mean β-value for the CpGs denoted by [[CG]] in SEQ ID NO: 5296;
[1580] 593. CpGs whose cancer index value is determined are located within at least DMR 297 defined by SEQ ID NO: 5297, and wherein when the cancer index for the individual is about 0.041 or more the individual is classified as having CIN3 and/or cancer or as having a high risk of CIN3 and/or cancer development, and wherein the sensitivity of the assay is at least 71.00% and the specificity of the assay is at least 75.00%, preferably wherein the panel of one or more CpGs comprises at least eleven CpG from DMR 297, and more preferably wherein the cancer index value is the mean β-value for the CpGs denoted by [[CG]] in SEQ ID NO: 5297;
[1581] 594. CpGs whose cancer index value is determined are located within at least DMR 297 defined by SEQ ID NO: 5297, and wherein when the cancer index for the individual is less than about 0.041 the individual is classified as not having CIN3 and/or cancer or as having a low risk of CIN3 and/or cancer development, and wherein the sensitivity of the assay is at least 71.00% and the specificity of the assay is at least 75.00%, preferably wherein the panel of one or more CpGs comprises at least eleven CpG from DMR 297, and more preferably wherein the cancer index value is the mean β-value for the CpGs denoted by [[CG]] in SEQ ID NO: 5297;
[1582] 595. CpGs whose cancer index value is determined are located within at least DMR 298 defined by SEQ ID NO: 5298, and wherein when the cancer index for the individual is about 0.041 or more the individual is classified as having CIN3 and/or cancer or as having a high risk of CIN3 and/or cancer development, and wherein the sensitivity of the assay is at least 72.00% and the specificity of the assay is at least 75.00%, preferably wherein the panel of one or more CpGs comprises at least six CpG from DMR 298, and more preferably wherein the cancer index value is the mean β-value for the CpGs denoted by [[CG]] in SEQ ID NO: 5298;
[1583] 596. CpGs whose cancer index value is determined are located within at least DMR 298 defined by SEQ ID NO: 5298, and wherein when the cancer index for the individual is less than about 0.041 the individual is classified as not having CIN3 and/or cancer or as having a low risk of CIN3 and/or cancer development, and wherein the sensitivity of the assay is at least 72.00% and the specificity of the assay is at least 75.00%, preferably wherein the panel of one or more CpGs comprises at least six CpG from DMR 298, and more preferably wherein the cancer index value is the mean β-value for the CpGs denoted by [[CG]] in SEQ ID NO: 5298;
[1584] 597. CpGs whose cancer index value is determined are located within at least DMR 299 defined by SEQ ID NO: 5299, and wherein when the cancer index for the individual is about 0.087 or more the individual is classified as having CIN3 and/or cancer or as having a high risk of CIN3 and/or cancer development, and wherein the sensitivity of the assay is at least 68.00% and the specificity of the assay is at least 75.00%, preferably wherein the panel of one or more CpGs comprises at least three CpG from DMR 299, and more preferably wherein the cancer index value is the mean β-value for the CpGs denoted by [[CG]] in SEQ ID NO: 5299;
[1585] 598. CpGs whose cancer index value is determined are located within at least DMR 299 defined by SEQ ID NO: 5299, and wherein when the cancer index for the individual is less than about 0.087 the individual is classified as not having CIN3 and/or cancer or as having a low risk of CIN3 and/or cancer development, and wherein the sensitivity of the assay is at least 68.00% and the specificity of the assay is at least 75.00%, preferably wherein the panel of one or more CpGs comprises at least three CpG from DMR 299, and more preferably wherein the cancer index value is the mean β-value for the CpGs denoted by [[CG]] in SEQ ID NO: 5299;
[1586] 599. CpGs whose cancer index value is determined are located within at least DMR 300 defined by SEQ ID NO: 5300, and wherein when the cancer index for the individual is about 0.041 or more the individual is classified as having CIN3 and/or cancer or as having a high risk of CIN3 and/or cancer development, and wherein the sensitivity of the assay is at least 72.00% and the specificity of the assay is at least 75.00%, preferably wherein the panel of one or more CpGs comprises at least six CpG from DMR 300, and more preferably wherein the cancer index value is the mean β-value for the CpGs denoted by [[CG]] in SEQ ID NO: 5300;
[1587] 600. CpGs whose cancer index value is determined are located within at least DMR 300 defined by SEQ ID NO: 5300, and wherein when the cancer index for the individual is less than about 0.041 the individual is classified as not having CIN3 and/or cancer or as having a low risk of CIN3 and/or cancer development, and wherein the sensitivity of the assay is at least 72.00% and the specificity of the assay is at least 75.00%, preferably wherein the panel of one or more CpGs comprises at least six CpG from DMR 300, and more preferably wherein the cancer index value is the mean β-value for the CpGs denoted by [[CG]] in SEQ ID NO: 5300;
[1588] 601. CpGs whose cancer index value is determined are located within at least DMR 301 defined by SEQ ID NO: 5301, and wherein when the cancer index for the individual is about 0.041 or more the individual is classified as having CIN3 and/or cancer or as having a high risk of CIN3 and/or cancer development, and wherein the sensitivity of the assay is at least 71.00% and the specificity of the assay is at least 75.00%, preferably wherein the panel of one or more CpGs comprises at least eleven CpG from DMR 301, and more preferably wherein the cancer index value is the mean β-value for the CpGs denoted by [[CG]] in SEQ ID NO: 5301;
[1589] 602. CpGs whose cancer index value is determined are located within at least DMR 301 defined by SEQ ID NO: 5301, and wherein when the cancer index for the individual is less than about 0.041 the individual is classified as not having CIN3 and/or cancer or as having a low risk of CIN3 and/or cancer development, and wherein the sensitivity of the assay is at least 71.00% and the specificity of the assay is at least 75.00%, preferably wherein the panel of one or more CpGs comprises at least eleven CpG from DMR 301, and more preferably wherein the cancer index value is the mean β-value for the CpGs denoted by [[CG]] in SEQ ID NO: 5301;
[1590] 603. CpGs whose cancer index value is determined are located within at least DMR 302 defined by SEQ ID NO: 5302, and wherein when the cancer index for the individual is about 0.052 or more the individual is classified as having CIN3 and/or cancer or as having a high risk of CIN3 and/or cancer development, and wherein the sensitivity of the assay is at least 70.00% and the specificity of the assay is at least 75.00%, preferably wherein the panel of one or more CpGs comprises at least three CpG from DMR 302, and more preferably wherein the cancer index value is the mean β-value for the CpGs denoted by [[CG]] in SEQ ID NO: 5302;
[1591] 604. CpGs whose cancer index value is determined are located within at least DMR 302 defined by SEQ ID NO: 5302, and wherein when the cancer index for the individual is less than about 0.052 the individual is classified as not having CIN3 and/or cancer or as having a low risk of CIN3 and/or cancer development, and wherein the sensitivity of the assay is at least 70.00% and the specificity of the assay is at least 75.00%, preferably wherein the panel of one or more CpGs comprises at least three CpG from DMR 302, and more preferably wherein the cancer index value is the mean β-value for the CpGs denoted by [[CG]] in SEQ ID NO: 5302;
[1592] 605. CpGs whose cancer index value is determined are located within at least DMR 303 defined by SEQ ID NO: 5303, and wherein when the cancer index for the individual is about 0.041 or more the individual is classified as having CIN3 and/or cancer or as having a high risk of CIN3 and/or cancer development, and wherein the sensitivity of the assay is at least 71.00% and the specificity of the assay is at least 75.00%, preferably wherein the panel of one or more CpGs comprises at least eleven CpG from DMR 303, and more preferably wherein the cancer index value is the mean β-value for the CpGs denoted by [[CG]] in SEQ ID NO: 5303;
[1593] 606. CpGs whose cancer index value is determined are located within at least DMR 303 defined by SEQ ID NO: 5303, and wherein when the cancer index for the individual is less than about 0.041 the individual is classified as not having CIN3 and/or cancer or as having a low risk of CIN3 and/or cancer development, and wherein the sensitivity of the assay is at least 71.00% and the specificity of the assay is at least 75.00%, preferably wherein the panel of one or more CpGs comprises at least eleven CpG from DMR 303, and more preferably wherein the cancer index value is the mean β-value for the CpGs denoted by [[CG]] in SEQ ID NO: 5303;
[1594] 607. CpGs whose cancer index value is determined are located within at least DMR 304 defined by SEQ ID NO: 5304, and wherein when the cancer index for the individual is about 0.056 or more the individual is classified as having CIN3 and/or cancer or as having a high risk of CIN3 and/or cancer development, and wherein the sensitivity of the assay is at least 74.00% and the specificity of the assay is at least 75.00%, preferably wherein the panel of one or more CpGs comprises at least seven CpG from DMR 304, and more preferably wherein the cancer index value is the mean β-value for the CpGs denoted by [[CG]] in SEQ ID NO: 5304;
[1595] 608. CpGs whose cancer index value is determined are located within at least DMR 304 defined by SEQ ID NO: 5304, and wherein when the cancer index for the individual is less than about 0.056 the individual is classified as not having CIN3 and/or cancer or as having a low risk of CIN3 and/or cancer development, and wherein the sensitivity of the assay is at least 74.00% and the specificity of the assay is at least 75.00%, preferably wherein the panel of one or more CpGs comprises at least seven CpG from DMR 304, and more preferably wherein the cancer index value is the mean β-value for the CpGs denoted by [[CG]] in SEQ ID NO: 5304;
[1596] 609. CpGs whose cancer index value is determined are located within at least DMR 305 defined by SEQ ID NO: 5305, and wherein when the cancer index for the individual is about 0.113 or more the individual is classified as having CIN3 and/or cancer or as having a high risk of CIN3 and/or cancer development, and wherein the sensitivity of the assay is at least 69.00% and the specificity of the assay is at least 75.00%, preferably wherein the panel of one or more CpGs comprises at least one CpG from DMR 305, and more preferably wherein the cancer index value is the mean β-value for the CpGs denoted by [[CG]] in SEQ ID NO: 5305;
[1597] 610. CpGs whose cancer index value is determined are located within at least DMR 305 defined by SEQ ID NO: 5305, and wherein when the cancer index for the individual is less than about 0.113 the individual is classified as not having CIN3 and/or cancer or as having a low risk of CIN3 and/or cancer development, and wherein the sensitivity of the assay is at least 69.00% and the specificity of the assay is at least 75.00%, preferably wherein the panel of one or more CpGs comprises at least one CpG from DMR 305, and more preferably wherein the cancer index value is the mean β-value for the CpGs denoted by [[CG]] in SEQ ID NO: 5305;
[1598] 611. CpGs whose cancer index value is determined are located within at least DMR 306 defined by SEQ ID NO: 5306, and wherein when the cancer index for the individual is about 0.061 or more the individual is classified as having CIN3 and/or cancer or as having a high risk of CIN3 and/or cancer development, and wherein the sensitivity of the assay is at least 74.00% and the specificity of the assay is at least 75.00%, preferably wherein the panel of one or more CpGs comprises at least six CpG from DMR 306, and more preferably wherein the cancer index value is the mean β-value for the CpGs denoted by [[CG]] in SEQ ID NO: 5306;
[1599] 612. CpGs whose cancer index value is determined are located within at least DMR 306 defined by SEQ ID NO: 5306, and wherein when the cancer index for the individual is less than about 0.061 the individual is classified as not having CIN3 and/or cancer or as having a low risk of CIN3 and/or cancer development, and wherein the sensitivity of the assay is at least 74.00% and the specificity of the assay is at least 75.00%, preferably wherein the panel of one or more CpGs comprises at least six CpG from DMR 306, and more preferably wherein the cancer index value is the mean β-value for the CpGs denoted by [[CG]] in SEQ ID NO: 5306;
[1600] 613. CpGs whose cancer index value is determined are located within at least DMR 307 defined by SEQ ID NO: 5307, and wherein when the cancer index for the individual is about 0.045 or more the individual is classified as having CIN3 and/or cancer or as having a high risk of CIN3 and/or cancer development, and wherein the sensitivity of the assay is at least 66.00% and the specificity of the assay is at least 75.00%, preferably wherein the panel of one or more CpGs comprises at least twenty-three CpG from DMR 307, and more preferably wherein the cancer index value is the mean β-value for the CpGs denoted by [[CG]] in SEQ ID NO: 5307;
[1601] 614. CpGs whose cancer index value is determined are located within at least DMR 307 defined by SEQ ID NO: 5307, and wherein when the cancer index for the individual is less than about 0.045 the individual is classified as not having CIN3 and/or cancer or as having a low risk of CIN3 and/or cancer development, and wherein the sensitivity of the assay is at least 66.00% and the specificity of the assay is at least 75.00%, preferably wherein the panel of one or more CpGs comprises at least twenty-three CpG from DMR 307, and more preferably wherein the cancer index value is the mean β-value for the CpGs denoted by [[CG]] in SEQ ID NO: 5307;
[1602] 615. CpGs whose cancer index value is determined are located within at least DMR 308 defined by SEQ ID NO: 5308, and wherein when the cancer index for the individual is about 0.037 or more the individual is classified as having CIN3 and/or cancer or as having a high risk of CIN3 and/or cancer development, and wherein the sensitivity of the assay is at least 74.00% and the specificity of the assay is at least 75.00%, preferably wherein the panel of one or more CpGs comprises at least three CpG from DMR 308, and more preferably wherein the cancer index value is the mean β-value for the CpGs denoted by [[CG]] in SEQ ID NO: 5308;
[1603] 616. CpGs whose cancer index value is determined are located within at least DMR 308 defined by SEQ ID NO: 5308, and wherein when the cancer index for the individual is less than about 0.037 the individual is classified as not having CIN3 and/or cancer or as having a low risk of CIN3 and/or cancer development, and wherein the sensitivity of the assay is at least 74.00% and the specificity of the assay is at least 75.00%, preferably wherein the panel of one or more CpGs comprises at least three CpG from DMR 308, and more preferably wherein the cancer index value is the mean β-value for the CpGs denoted by [[CG]] in SEQ ID NO: 5308;
[1604] 617. CpGs whose cancer index value is determined are located within at least DMR 309 defined by SEQ ID NO: 5309, and wherein when the cancer index for the individual is about 0.032 or more the individual is classified as having CIN3 and/or cancer or as having a high risk of CIN3 and/or cancer development, and wherein the sensitivity of the assay is at least 64.00% and the specificity of the assay is at least 75.00%, preferably wherein the panel of one or more CpGs comprises at least seven CpG from DMR 309, and more preferably wherein the cancer index value is the mean β-value for the CpGs denoted by [[CG]] in SEQ ID NO: 5309;
[1605] 618. CpGs whose cancer index value is determined are located within at least DMR 309 defined by SEQ ID NO: 5309, and wherein when the cancer index for the individual is less than about 0.032 the individual is classified as not having CIN3 and/or cancer or as having a low risk of CIN3 and/or cancer development, and wherein the sensitivity of the assay is at least 64.00% and the specificity of the assay is at least 75.00%, preferably wherein the panel of one or more CpGs comprises at least seven CpG from DMR 309, and more preferably wherein the cancer index value is the mean β-value for the CpGs denoted by [[CG]] in SEQ ID NO: 5309;
[1606] 619. CpGs whose cancer index value is determined are located within at least DMR 310 defined by SEQ ID NO: 5310, and wherein when the cancer index for the individual is about 0.037 or more the individual is classified as having CIN3 and/or cancer or as having a high risk of CIN3 and/or cancer development, and wherein the sensitivity of the assay is at least 74.00% and the specificity of the assay is at least 75.00%, preferably wherein the panel of one or more CpGs comprises at least three CpG from DMR 310, and more preferably wherein the cancer index value is the mean β-value for the CpGs denoted by [[CG]] in SEQ ID NO: 5310;
[1607] 620. CpGs whose cancer index value is determined are located within at least DMR 310 defined by SEQ ID NO: 5310, and wherein when the cancer index for the individual is less than about 0.037 the individual is classified as not having CIN3 and/or cancer or as having a low risk of CIN3 and/or cancer development, and wherein the sensitivity of the assay is at least 74.00% and the specificity of the assay is at least 75.00%, preferably wherein the panel of one or more CpGs comprises at least three CpG from DMR 310, and more preferably wherein the cancer index value is the mean β-value for the CpGs denoted by [[CG]] in SEQ ID NO: 5310;
[1608] 621. CpGs whose cancer index value is determined are located within at least DMR 311 defined by SEQ ID NO: 5311, and wherein when the cancer index for the individual is about 0.043 or more the individual is classified as having CIN3 and/or cancer or as having a high risk of CIN3 and/or cancer development, and wherein the sensitivity of the assay is at least 71.00% and the specificity of the assay is at least 75.00%, preferably wherein the panel of one or more CpGs comprises at least ten CpG from DMR 311, and more preferably wherein the cancer index value is the mean β-value for the CpGs denoted by [[CG]] in SEQ ID NO: 5311;
[1609] 622. CpGs whose cancer index value is determined are located within at least DMR 311 defined by SEQ ID NO: 5311, and wherein when the cancer index for the individual is less than about 0.043 the individual is classified as not having CIN3 and/or cancer or as having a low risk of CIN3 and/or cancer development, and wherein the sensitivity of the assay is at least 71.00% and the specificity of the assay is at least 75.00%, preferably wherein the panel of one or more CpGs comprises at least ten CpG from DMR 311, and more preferably wherein the cancer index value is the mean β-value for the CpGs denoted by [[CG]] in SEQ ID NO: 5311;
[1610] 623. CpGs whose cancer index value is determined are located within at least DMR 312 defined by SEQ ID NO: 5312, and wherein when the cancer index for the individual is about 0.043 or more the individual is classified as having CIN3 and/or cancer or as having a high risk of CIN3 and/or cancer development, and wherein the sensitivity of the assay is at least 71.00% and the specificity of the assay is at least 75.00%, preferably wherein the panel of one or more CpGs comprises at least ten CpG from DMR 312, and more preferably wherein the cancer index value is the mean β-value for the CpGs denoted by [[CG]] in SEQ ID NO: 5312;
[1611] 624. CpGs whose cancer index value is determined are located within at least DMR 312 defined by SEQ ID NO: 5312, and wherein when the cancer index for the individual is less than about 0.043 the individual is classified as not having CIN3 and/or cancer or as having a low risk of CIN3 and/or cancer development, and wherein the sensitivity of the assay is at least 71.00% and the specificity of the assay is at least 75.00%, preferably wherein the panel of one or more CpGs comprises at least ten CpG from DMR 312, and more preferably wherein the cancer index value is the mean β-value for the CpGs denoted by [[CG]] in SEQ ID NO: 5312;
[1612] 625. CpGs whose cancer index value is determined are located within at least DMR 313 defined by SEQ ID NO: 5313, and wherein when the cancer index for the individual is about 0.037 or more the individual is classified as having CIN3 and/or cancer or as having a high risk of CIN3 and/or cancer development, and wherein the sensitivity of the assay is at least 69.00% and the specificity of the assay is at least 75.00%, preferably wherein the panel of one or more CpGs comprises at least three CpG from DMR 313, and more preferably wherein the cancer index value is the mean β-value for the CpGs denoted by [[CG]] in SEQ ID NO: 5313;
[1613] 626. CpGs whose cancer index value is determined are located within at least DMR 313 defined by SEQ ID NO: 5313, and wherein when the cancer index for the individual is less than about 0.037 the individual is classified as not having CIN3 and/or cancer or as having a low risk of CIN3 and/or cancer development, and wherein the sensitivity of the assay is at least 69.00% and the specificity of the assay is at least 75.00%, preferably wherein the panel of one or more CpGs comprises at least three CpG from DMR 313, and more preferably wherein the cancer index value is the mean β-value for the CpGs denoted by [[CG]] in SEQ ID NO: 5313;
[1614] 627. CpGs whose cancer index value is determined are located within at least DMR 314 defined by SEQ ID NO: 5314, and wherein when the cancer index for the individual is about 0.041 or more the individual is classified as having CIN3 and/or cancer or as having a high risk of CIN3 and/or cancer development, and wherein the sensitivity of the assay is at least 74.00% and the specificity of the assay is at least 75.00%, preferably wherein the panel of one or more CpGs comprises at least six CpG from DMR 314, and more preferably wherein the cancer index value is the mean β-value for the CpGs denoted by [[CG]] in SEQ ID NO: 5314;
[1615] 628. CpGs whose cancer index value is determined are located within at least DMR 314 defined by SEQ ID NO: 5314, and wherein when the cancer index for the individual is less than about 0.041 the individual is classified as not having CIN3 and/or cancer or as having a low risk of CIN3 and/or cancer development, and wherein the sensitivity of the assay is at least 74.00% and the specificity of the assay is at least 75.00%, DMR 314, and more preferably wherein the cancer index value is the mean β-value for the CpGs denoted by [[CG]] in SEQ ID NO: 5314;
[1616] 629. CpGs whose cancer index value is determined are located within at least DMR 315 defined by SEQ ID NO: 5315, and wherein when the cancer index for the individual is about 0.035 or more the individual is classified as having CIN3 and/or cancer or as having a high risk of CIN3 and/or cancer development, and wherein the sensitivity of the assay is at least 69.00% and the specificity of the assay is at least 75.00%, preferably wherein the panel of one or more CpGs comprises at least twenty-two CpG from DMR 315, and more preferably wherein the cancer index value is the mean β-value for the CpGs denoted by [[CG]] in SEQ ID NO: 5315;
[1617] 630. CpGs whose cancer index value is determined are located within at least DMR 315 defined by SEQ ID NO: 5315, and wherein when the cancer index for the individual is less than about 0.035 the individual is classified as not having CIN3 and/or cancer or as having a low risk of CIN3 and/or cancer development, and wherein the sensitivity of the assay is at least 69.00% and the specificity of the assay is at least 75.00%, preferably wherein the panel of one or more CpGs comprises at least twenty-two CpG from DMR 315, and more preferably wherein the cancer index value is the mean β-value for the CpGs denoted by [[CG]] in SEQ ID NO: 5315;
[1618] 631. CpGs whose cancer index value is determined are located within at least DMR 316 defined by SEQ ID NO: 5316, and wherein when the cancer index for the individual is about 0.037 or more the individual is classified as having CIN3 and/or cancer or as having a high risk of CIN3 and/or cancer development, and wherein the sensitivity of the assay is at least 69.00% and the specificity of the assay is at least 75.00%, preferably wherein the panel of one or more CpGs comprises at least three CpG from DMR 316, and more preferably wherein the cancer index value is the mean β-value for the CpGs denoted by [[CG]] in SEQ ID NO: 5316;
[1619] 632. CpGs whose cancer index value is determined are located within at least DMR 316 defined by SEQ ID NO: 5316, and wherein when the cancer index for the individual is less than about 0.037 the individual is classified as not having CIN3 and/or cancer or as having a low risk of CIN3 and/or cancer development, and wherein the sensitivity of the assay is at least 69.00% and the specificity of the assay is at least 75.00%, preferably wherein the panel of one or more CpGs comprises at least three CpG from DMR 316, and more preferably wherein the cancer index value is the mean β-value for the CpGs denoted by [[CG]] in SEQ ID NO: 5316;
[1620] 633. CpGs whose cancer index value is determined are located within at least DMR 317 defined by SEQ ID NO: 5317, and wherein when the cancer index for the individual is about 0.035 or more the individual is classified as having CIN3 and/or cancer or as having a high risk of CIN3 and/or cancer development, and wherein the sensitivity of the assay is at least 69.00% and the specificity of the assay is at least 75.00%, preferably wherein the panel of one or more CpGs comprises at least twenty-two CpG from DMR 317, and more preferably wherein the cancer index value is the mean β-value for the CpGs denoted by [[CG]] in SEQ ID NO: 5317;
[1621] 634. CpGs whose cancer index value is determined are located within at least DMR 317 defined by SEQ ID NO: 5317, and wherein when the cancer index for the individual is less than about 0.035 the individual is classified as not having CIN3 and/or cancer or as having a low risk of CIN3 and/or cancer development, and wherein the sensitivity of the assay is at least 69.00% and the specificity of the assay is at least 75.00%, preferably wherein the panel of one or more CpGs comprises at least twenty-two CpG from DMR 317, and more preferably wherein the cancer index value is the mean β-value for the CpGs denoted by [[CG]] in SEQ ID NO: 5317;
[1622] 635. CpGs whose cancer index value is determined are located within at least DMR 318 defined by SEQ ID NO: 5318, and wherein when the cancer index for the individual is about 0.027 or more the individual is classified as having CIN3 and/or cancer or as having a high risk of CIN3 and/or cancer development, and wherein the sensitivity of the assay is at least 71.00% and the specificity of the assay is at least 75.00%, preferably wherein the panel of one or more CpGs comprises at least five CpG from DMR 318, and more preferably wherein the cancer index value is the mean β-value for the CpGs denoted by [[CG]] in SEQ ID NO: 5318;
[1623] 636. CpGs whose cancer index value is determined are located within at least DMR 318 defined by SEQ ID NO: 5318, and wherein when the cancer index for the individual is less than about 0.027 the individual is classified as not having CIN3 and/or cancer or as having a low risk of CIN3 and/or cancer development, and wherein the sensitivity of the assay is at least 71.00% and the specificity of the assay is at least 75.00%, preferably wherein the panel of one or more CpGs comprises at least five CpG from DMR 318, and more preferably wherein the cancer index value is the mean β-value for the CpGs denoted by [[CG]] in SEQ ID NO: 5318;
[1624] 637. CpGs whose cancer index value is determined are located within at least DMR 319 defined by SEQ ID NO: 5319, and wherein when the cancer index for the individual is about 0.029 or more the individual is classified as having CIN3 and/or cancer or as having a high risk of CIN3 and/or cancer development, and wherein the sensitivity of the assay is at least 69.00% and the specificity of the assay is at least 75.00%, preferably wherein the panel of one or more CpGs comprises at least three CpG from DMR 319, and more preferably wherein the cancer index value is the mean β-value for the CpGs denoted by [[CG]] in SEQ ID NO: 5319;
[1625] 638. CpGs whose cancer index value is determined are located within at least DMR 319 defined by SEQ ID NO: 5319, and wherein when the cancer index for the individual is less than about 0.029 the individual is classified as not having CIN3 and/or cancer or as having a low risk of CIN3 and/or cancer development, and wherein the sensitivity of the assay is at least 69.00% and the specificity of the assay is at least 75.00%, preferably wherein the panel of one or more CpGs comprises at least three CpG from DMR 319, and more preferably wherein the cancer index value is the mean β-value for the CpGs denoted by [[CG]] in SEQ ID NO: 5319;
[1626] 639. CpGs whose cancer index value is determined are located within at least DMR 320 defined by SEQ ID NO: 5320, and wherein when the cancer index for the individual is about 0.029 or more the individual is classified as having CIN3 and/or cancer or as having a high risk of CIN3 and/or cancer development, and wherein the sensitivity of the assay is at least 69.00% and the specificity of the assay is at least 75.00%, preferably wherein the panel of one or more CpGs comprises at least three CpG from DMR 320, and more preferably wherein the cancer index value is the mean β-value for the CpGs denoted by [[CG]] in SEQ ID NO: 5320;
[1627] 640. CpGs whose cancer index value is determined are located within at least DMR 320 defined by SEQ ID NO: 5320, and wherein when the cancer index for the individual is less than about 0.029 the individual is classified as not having CIN3 and/or cancer or as having a low risk of CIN3 and/or cancer development, and wherein the sensitivity of the assay is at least 69.00% and the specificity of the assay is at least 75.00%, preferably wherein the panel of one or more CpGs comprises at least three CpG from DMR 320, and more preferably wherein the cancer index value is the mean β-value for the CpGs denoted by [[CG]] in SEQ ID NO: 5320;
[1628] 641. CpGs whose cancer index value is determined are located within at least DMR 321 defined by SEQ ID NO: 5321, and wherein when the cancer index for the individual is about 0.055 or more the individual is classified as having CIN3 and/or cancer or as having a high risk of CIN3 and/or cancer development, and wherein the sensitivity of the assay is at least 63.00% and the specificity of the assay is at least 75.00%, preferably wherein the panel of one or more CpGs comprises at least four CpG from DMR 321, and more preferably wherein the cancer index value is the mean β-value for the CpGs denoted by [[CG]] in SEQ ID NO: 5321;
[1629] 642. CpGs whose cancer index value is determined are located within at least DMR 321 defined by SEQ ID NO: 5321, and wherein when the cancer index for the individual is less than about 0.055 the individual is classified as not having CIN3 and/or cancer or as having a low risk of CIN3 and/or cancer development, and wherein the sensitivity of the assay is at least 63.00% and the specificity of the assay is at least 75.00%, preferably wherein the panel of one or more CpGs comprises at least four CpG from DMR 321, and more preferably wherein the cancer index value is the mean β-value for the CpGs denoted by [[CG]] in SEQ ID NO: 5321;
[1630] 643. CpGs whose cancer index value is determined are located within at least DMR 322 defined by SEQ ID NO: 5322, and wherein when the cancer index for the individual is about 0.055 or more the individual is classified as having CIN3 and/or cancer or as having a high risk of CIN3 and/or cancer development, and wherein the sensitivity of the assay is at least 63.00% and the specificity of the assay is at least 75.00%, preferably wherein the panel of one or more CpGs comprises at least four CpG from DMR 322, and more preferably wherein the cancer index value is the mean β-value for the CpGs denoted by [[CG]] in SEQ ID NO: 5322;
[1631] 644. CpGs whose cancer index value is determined are located within at least DMR 322 defined by SEQ ID NO: 5322, and wherein when the cancer index for the individual is less than about 0.055 the individual is classified as not having CIN3 and/or cancer or as having a low risk of CIN3 and/or cancer development, and wherein the sensitivity of the assay is at least 63.00% and the specificity of the assay is at least 75.00%, preferably wherein the panel of one or more CpGs comprises at least four CpG from DMR 322, and more preferably wherein the cancer index value is the mean β-value for the CpGs denoted by [[CG]] in SEQ ID NO: 5322;
[1632] 645. CpGs whose cancer index value is determined are located within at least DMR 323 defined by SEQ ID NO: 5323, and wherein when the cancer index for the individual is about 0.029 or more the individual is classified as having CIN3 and/or cancer or as having a high risk of CIN3 and/or cancer development, and wherein the sensitivity of the assay is at least 69.00% and the specificity of the assay is at least 75.00%, preferably wherein the panel of one or more CpGs comprises at least three CpG from DMR 323, and more preferably wherein the cancer index value is the mean β-value for the CpGs denoted by [[CG]] in SEQ ID NO: 5323;
[1633] 646. CpGs whose cancer index value is determined are located within at least DMR 323 defined by SEQ ID NO: 5323, and wherein when the cancer index for the individual is less than about 0.029 the individual is classified as not having CIN3 and/or cancer or as having a low risk of CIN3 and/or cancer development, and wherein the sensitivity of the assay is at least 69.00% and the specificity of the assay is at least 75.00%, preferably wherein the panel of one or more CpGs comprises at least three CpG from DMR 323, and more preferably wherein the cancer index value is the mean β-value for the CpGs denoted by [[CG]] in SEQ ID NO: 5323;
[1634] 647. CpGs whose cancer index value is determined are located within at least DMR 324 defined by SEQ ID NO: 5324, and wherein when the cancer index for the individual is about 0.022 or more the individual is classified as having CIN3 and/or cancer or as having a high risk of CIN3 and/or cancer development, and wherein the sensitivity of the assay is at least 69.00% and the specificity of the assay is at least 75.00%, preferably wherein the panel of one or more CpGs comprises at least four CpG from DMR 324, and more preferably wherein the cancer index value is the mean β-value for the CpGs denoted by [[CG]] in SEQ ID NO: 5324;
[1635] 648. CpGs whose cancer index value is determined are located within at least DMR 324 defined by SEQ ID NO: 5324, and wherein when the cancer index for the individual is less than about 0.022 the individual is classified as not having CIN3 and/or cancer or as having a low risk of CIN3 and/or cancer development, and wherein the sensitivity of the assay is at least 69.00% and the specificity of the assay is at least 75.00%, preferably wherein the panel of one or more CpGs comprises at least four CpG from DMR 324, and more preferably wherein the cancer index value is the mean β-value for the CpGs denoted by [[CG]] in SEQ ID NO: 5324;
[1636] 649. CpGs whose cancer index value is determined are located within at least DMR 325 defined by SEQ ID NO: 5325, and wherein when the cancer index for the individual is about 0.122 or more the individual is classified as having CIN3 and/or cancer or as having a high risk of CIN3 and/or cancer development, and wherein the sensitivity of the assay is at least 70.00% and the specificity of the assay is at least 75.00%, preferably wherein the panel of one or more CpGs comprises at least three CpG from DMR 325, and more preferably wherein the cancer index value is the mean β-value for the CpGs denoted by [[CG]] in SEQ ID NO: 5325;
[1637] 650. CpGs whose cancer index value is determined are located within at least DMR 325 defined by SEQ ID NO: 5325, and wherein when the cancer index for the individual is less than about 0.122 the individual is classified as not having CIN3 and/or cancer or as having a low risk of CIN3 and/or cancer development, and wherein the sensitivity of the assay is at least 70.00% and the specificity of the assay is at least 75.00%, preferably wherein the panel of one or more CpGs comprises at least three CpG from DMR 325, and more preferably wherein the cancer index value is the mean β-value for the CpGs denoted by [[CG]] in SEQ ID NO: 5325;
[1638] 651. CpGs whose cancer index value is determined are located within at least DMR 326 defined by SEQ ID NO: 5326, and wherein when the cancer index for the individual is about 0.071 or more the individual is classified as having CIN3 and/or cancer or as having a high risk of CIN3 and/or cancer development, and wherein the sensitivity of the assay is at least 70.00% and the specificity of the assay is at least 75.00%, DMR 326, and more preferably wherein the cancer index value is the mean β-value for the CpGs denoted by [[CG]] in SEQ ID NO: 5326;
[1639] 652. CpGs whose cancer index value is determined are located within at least DMR 326 defined by SEQ ID NO: 5326, and wherein when the cancer index for the individual is less than about 0.071 the individual is classified as not having CIN3 and/or cancer or as having a low risk of CIN3 and/or cancer development, and wherein the sensitivity of the assay is at least 70.00% and the specificity of the assay is at least 75.00%, preferably wherein the panel of one or more CpGs comprises at least six CpG from DMR 326, and more preferably wherein the cancer index value is the mean β-value for the CpGs denoted by [[CG]] in SEQ ID NO: 5326;
[1640] 653. CpGs whose cancer index value is determined are located within at least DMR 327 defined by SEQ ID NO: 5327, and wherein when the cancer index for the individual is about 0.071 or more the individual is classified as having CIN3 and/or cancer or as having a high risk of CIN3 and/or cancer development, and wherein the sensitivity of the assay is at least 70.00% and the specificity of the assay is at least 75.00%, preferably wherein the panel of one or more CpGs comprises at least six CpG from DMR 327, and more preferably wherein the cancer index value is the mean β-value for the CpGs denoted by [[CG]] in SEQ ID NO: 5327;
[1641] 654. CpGs whose cancer index value is determined are located within at least DMR 327 defined by SEQ ID NO: 5327, and wherein when the cancer index for the individual is less than about 0.071 the individual is classified as not having CIN3 and/or cancer or as having a low risk of CIN3 and/or cancer development, and wherein the sensitivity of the assay is at least 70.00% and the specificity of the assay is at least 75.00%, preferably wherein the panel of one or more CpGs comprises at least six CpG from DMR 327, and more preferably wherein the cancer index value is the mean β-value for the CpGs denoted by [[CG]] in SEQ ID NO: 5327;
[1642] 655. CpGs whose cancer index value is determined are located within at least DMR 328 defined by SEQ ID NO: 5328, and wherein when the cancer index for the individual is about 0.034 or more the individual is classified as having CIN3 and/or cancer or as having a high risk of CIN3 and/or cancer development, and wherein the sensitivity of the assay is at least 68.00% and the specificity of the assay is at least 75.00%, preferably wherein the panel of one or more CpGs comprises at least twenty-one CpG from DMR 328, and more preferably wherein the cancer index value is the mean β-value for the CpGs denoted by [[CG]] in SEQ ID NO: 5328;
[1643] 656. CpGs whose cancer index value is determined are located within at least DMR 328 defined by SEQ ID NO: 5328, and wherein when the cancer index for the individual is less than about 0.034 the individual is classified as not having CIN3 and/or cancer or as having a low risk of CIN3 and/or cancer development, and wherein the sensitivity of the assay is at least 68.00% and the specificity of the assay is at least 75.00%, preferably wherein the panel of one or more CpGs comprises at least twenty-one CpG from DMR 328, and more preferably wherein the cancer index value is the mean β-value for the CpGs denoted by [[CG]] in SEQ ID NO: 5328;
[1644] 657. CpGs whose cancer index value is determined are located within at least DMR 329 defined by SEQ ID NO: 5329, and wherein when the cancer index for the individual is about 0.066 or more the individual is classified as having CIN3 and/or cancer or as having a high risk of CIN3 and/or cancer development, and wherein the sensitivity of the assay is at least 70.00% and the specificity of the assay is at least 75.00%, preferably wherein the panel of one or more CpGs comprises at least five CpG from DMR 329, and more preferably wherein the cancer index value is the mean β-value for the CpGs denoted by [[CG]] in SEQ ID NO: 5329;
[1645] 658. CpGs whose cancer index value is determined are located within at least DMR 329 defined by SEQ ID NO: 5329, and wherein when the cancer index for the individual is less than about 0.066 the individual is classified as not having CIN3 and/or cancer or as having a low risk of CIN3 and/or cancer development, and wherein the sensitivity of the assay is at least 70.00% and the specificity of the assay is at least 75.00%, preferably wherein the panel of one or more CpGs comprises at least five CpG from DMR 329, and more preferably wherein the cancer index value is the mean β-value for the CpGs denoted by [[CG]] in SEQ ID NO: 5329;
[1646] 659. CpGs whose cancer index value is determined are located within at least DMR 330 defined by SEQ ID NO: 5330, and wherein when the cancer index for the individual is about 0.122 or more the individual is classified as having CIN3 and/or cancer or as having a high risk of CIN3 and/or cancer development, and wherein the sensitivity of the assay is at least 70.00% and the specificity of the assay is at least 75.00%, preferably wherein the panel of one or more CpGs comprises at least three CpG from DMR 330, and more preferably wherein the cancer index value is the mean β-value for the CpGs denoted by [[CG]] in SEQ ID NO: 5330;
[1647] 660. CpGs whose cancer index value is determined are located within at least DMR 330 defined by SEQ ID NO: 5330, and wherein when the cancer index for the individual is less than about 0.122 the individual is classified as not having CIN3 and/or cancer or as having a low risk of CIN3 and/or cancer development, and wherein the sensitivity of the assay is at least 70.00% and the specificity of the assay is at least 75.00%, preferably wherein the panel of one or more CpGs comprises at least three CpG from DMR 330, and more preferably wherein the cancer index value is the mean β-value for the CpGs denoted by [[CG]] in SEQ ID NO: 5330;
[1648] 661. CpGs whose cancer index value is determined are located within at least DMR 331 defined by SEQ ID NO: 5331, and wherein when the cancer index for the individual is about 0.056 or more the individual is classified as having CIN3 and/or cancer or as having a high risk of CIN3 and/or cancer development, and wherein the sensitivity of the assay is at least 67.00% and the specificity of the assay is at least 75.00%, preferably wherein the panel of one or more CpGs comprises at least eight CpG from DMR 331, and more preferably wherein the cancer index value is the mean β-value for the CpGs denoted by [[CG]] in SEQ ID NO: 5331;
[1649] 662. CpGs whose cancer index value is determined are located within at least DMR 331 defined by SEQ ID NO: 5331, and wherein when the cancer index for the individual is less than about 0.056 the individual is classified as not having CIN3 and/or cancer or as having a low risk of CIN3 and/or cancer development, and wherein the sensitivity of the assay is at least 67.00% and the specificity of the assay is at least 75.00%, preferably wherein the panel of one or more CpGs comprises at least eight CpG from DMR 331, and more preferably wherein the cancer index value is the mean β-value for the CpGs denoted by [[CG]] in SEQ ID NO: 5331;
[1650] 663. CpGs whose cancer index value is determined are located within at least DMR 332 defined by SEQ ID NO: 5332, and wherein when the cancer index for the individual is about 0.071 or more the individual is classified as having CIN3 and/or cancer or as having a high risk of CIN3 and/or cancer development, and wherein the sensitivity of the assay is at least 70.00% and the specificity of the assay is at least 75.00%, preferably wherein the panel of one or more CpGs comprises at least six CpG from DMR 332, and more preferably wherein the cancer index value is the mean β-value for the CpGs denoted by [[CG]] in SEQ ID NO: 5332;
[1651] 664. CpGs whose cancer index value is determined are located within at least DMR 332 defined by SEQ ID NO: 5332, and wherein when the cancer index for the individual is less than about 0.071 the individual is classified as not having CIN3 and/or cancer or as having a low risk of CIN3 and/or cancer development, and wherein the sensitivity of the assay is at least 70.00% and the specificity of the assay is at least 75.00%, preferably wherein the panel of one or more CpGs comprises at least six CpG from DMR 332, and more preferably wherein the cancer index value is the mean β-value for the CpGs denoted by [[CG]] in SEQ ID NO: 5332;
[1652] 665. CpGs whose cancer index value is determined are located within at least DMR 333 defined by SEQ ID NO: 5333, and wherein when the cancer index for the individual is about 0.056 or more the individual is classified as having CIN3 and/or cancer or as having a high risk of CIN3 and/or cancer development, and wherein the sensitivity of the assay is at least 67.00% and the specificity of the assay is at least 75.00%, preferably wherein the panel of one or more CpGs comprises at least eight CpG from DMR 333, and more preferably wherein the cancer index value is the mean β-value for the CpGs denoted by [[CG]] in SEQ ID NO: 5333;
[1653] 666. CpGs whose cancer index value is determined are located within at least DMR 333 defined by SEQ ID NO: 5333, and wherein when the cancer index for the individual is less than about 0.056 the individual is classified as not having CIN3 and/or cancer or as having a low risk of CIN3 and/or cancer development, and wherein the sensitivity of the assay is at least 67.00% and the specificity of the assay is at least 75.00%, preferably wherein the panel of one or more CpGs comprises at least eight CpG from DMR 333, and more preferably wherein the cancer index value is the mean β-value for the CpGs denoted by [[CG]] in SEQ ID NO: 5333;
[1654] 667. CpGs whose cancer index value is determined are located within at least DMR 334 defined by SEQ ID NO: 5334, and wherein when the cancer index for the individual is about 0.04 or more the individual is classified as having CIN3 and/or cancer or as having a high risk of CIN3 and/or cancer development, and wherein the sensitivity of the assay is at least 64.00% and the specificity of the assay is at least 75.00%, preferably wherein the panel of one or more CpGs comprises at least five CpG from DMR 334, and more preferably wherein the cancer index value is the mean β-value for the CpGs denoted by [[CG]] in SEQ ID NO: 5334;
[1655] 668. CpGs whose cancer index value is determined are located within at least DMR 334 defined by SEQ ID NO: 5334, and wherein when the cancer index for the individual is less than about 0.04 the individual is classified as not having CIN3 and/or cancer or as having a low risk of CIN3 and/or cancer development, and wherein the sensitivity of the assay is at least 64.00% and the specificity of the assay is at least 75.00%, preferably wherein the panel of one or more CpGs comprises at least five CpG from DMR 334, and more preferably wherein the cancer index value is the mean β-value for the CpGs denoted by [[CG]] in SEQ ID NO: 5334;
[1656] 669. CpGs whose cancer index value is determined are located within at least DMR 335 defined by SEQ ID NO: 5335, and wherein when the cancer index for the individual is about 0.04 or more the individual is classified as having CIN3 and/or cancer or as having a high risk of CIN3 and/or cancer development, and wherein the sensitivity of the assay is at least 64.00% and the specificity of the assay is at least 75.00%, preferably wherein the panel of one or more CpGs comprises at least five CpG from DMR 335, and more preferably wherein the cancer index value is the mean β-value for the CpGs denoted by [[CG]] in SEQ ID NO: 5335;
[1657] 670. CpGs whose cancer index value is determined are located within at least DMR 335 defined by SEQ ID NO: 5335, and wherein when the cancer index for the individual is less than about 0.04 the individual is classified as not having CIN3 and/or cancer or as having a low risk of CIN3 and/or cancer development, and wherein the sensitivity of the assay is at least 64.00% and the specificity of the assay is at least 75.00%, preferably wherein the panel of one or more CpGs comprises at least five CpG from DMR 335, and more preferably wherein the cancer index value is the mean β-value for the CpGs denoted by [[CG]] in SEQ ID NO: 5335;
[1658] 671. CpGs whose cancer index value is determined are located within at least DMR 336 defined by SEQ ID NO: 5336, and wherein when the cancer index for the individual is about 0.056 or more the individual is classified as having CIN3 and/or cancer or as having a high risk of CIN3 and/or cancer development, and wherein the sensitivity of the assay is at least 67.00% and the specificity of the assay is at least 75.00%, preferably wherein the panel of one or more CpGs comprises at least eight CpG from DMR 336, and more preferably wherein the cancer index value is the mean β-value for the CpGs denoted by [[CG]] in SEQ ID NO: 5336;
[1659] 672. CpGs whose cancer index value is determined are located within at least DMR 336 defined by SEQ ID NO: 5336, and wherein when the cancer index for the individual is less than about 0.056 the individual is classified as not having CIN3 and/or cancer or as having a low risk of CIN3 and/or cancer development, and wherein the sensitivity of the assay is at least 67.00% and the specificity of the assay is at least 75.00%, preferably wherein the panel of one or more CpGs comprises at least eight CpG from DMR 336, and more preferably wherein the cancer index value is the mean β-value for the CpGs denoted by [[CG]] in SEQ ID NO: 5336;
[1660] 673. CpGs whose cancer index value is determined are located within at least DMR 337 defined by SEQ ID NO: 5337, and wherein when the cancer index for the individual is about 0.234 or more the individual is classified as having CIN3 and/or cancer or as having a high risk of CIN3 and/or cancer development, and wherein the sensitivity of the assay is at least 68.00% and the specificity of the assay is at least 75.00%, preferably wherein the panel of one or more CpGs comprises at least ten CpG from DMR 337, and more preferably wherein the cancer index value is the mean β-value for the CpGs denoted by [[CG]] in SEQ ID NO: 5337;
[1661] 674. CpGs whose cancer index value is determined are located within at least DMR 337 defined by SEQ ID NO: 5337, and wherein when the cancer index for the individual is less than about 0.234 the individual is classified as not having CIN3 and/or cancer or as having a low risk of CIN3 and/or cancer development, and wherein the sensitivity of the assay is at least 68.00% and the specificity of the assay is at least 75.00%, DMR 337, and more preferably wherein the cancer index value is the mean β-value for the CpGs denoted by [[CG]] in SEQ ID NO: 5337;
[1662] 675. CpGs whose cancer index value is determined are located within at least DMR 338 defined by SEQ ID NO: 5338, and wherein when the cancer index for the individual is about 0.056 or more the individual is classified as having CIN3 and/or cancer or as having a high risk of CIN3 and/or cancer development, and wherein the sensitivity of the assay is at least 67.00% and the specificity of the assay is at least 75.00%, preferably wherein the panel of one or more CpGs comprises at least eight CpG from DMR 338, and more preferably wherein the cancer index value is the mean β-value for the CpGs denoted by [[CG]] in SEQ ID NO: 5338;
[1663] 676. CpGs whose cancer index value is determined are located within at least DMR 338 defined by SEQ ID NO: 5338, and wherein when the cancer index for the individual is less than about 0.056 the individual is classified as not having CIN3 and/or cancer or as having a low risk of CIN3 and/or cancer development, and wherein the sensitivity of the assay is at least 67.00% and the specificity of the assay is at least 75.00%, preferably wherein the panel of one or more CpGs comprises at least eight CpG from DMR 338, and more preferably wherein the cancer index value is the mean β-value for the CpGs denoted by [[CG]] in SEQ ID NO: 5338;
[1664] 677. CpGs whose cancer index value is determined are located within at least DMR 339 defined by SEQ ID NO: 5339, and wherein when the cancer index for the individual is about 0.234 or more the individual is classified as having CIN3 and/or cancer or as having a high risk of CIN3 and/or cancer development, and wherein the sensitivity of the assay is at least 68.00% and the specificity of the assay is at least 75.00%, preferably wherein the panel of one or more CpGs comprises at least ten CpG from DMR 339, and more preferably wherein the cancer index value is the mean β-value for the CpGs denoted by [[CG]] in SEQ ID NO: 5339;
[1665] 678. CpGs whose cancer index value is determined are located within at least DMR 339 defined by SEQ ID NO: 5339, and wherein when the cancer index for the individual is less than about 0.234 the individual is classified as not having CIN3 and/or cancer or as having a low risk of CIN3 and/or cancer development, and wherein the sensitivity of the assay is at least 68.00% and the specificity of the assay is at least 75.00%, preferably wherein the panel of one or more CpGs comprises at least ten CpG from DMR 339, and more preferably wherein the cancer index value is the mean β-value for the CpGs denoted by [[CG]] in SEQ ID NO: 5339;
[1666] 679. CpGs whose cancer index value is determined are located within at least DMR 340 defined by SEQ ID NO: 5340, and wherein when the cancer index for the individual is about 0.234 or more the individual is classified as having CIN3 and/or cancer or as having a high risk of CIN3 and/or cancer development, and wherein the sensitivity of the assay is at least 68.00% and the specificity of the assay is at least 75.00%, preferably wherein the panel of one or more CpGs comprises at least ten CpG from DMR 340, and more preferably wherein the cancer index value is the mean β-value for the CpGs denoted by [[CG]] in SEQ ID NO: 5340;
[1667] 680. CpGs whose cancer index value is determined are located within at least DMR 340 defined by SEQ ID NO: 5340, and wherein when the cancer index for the individual is less than about 0.234 the individual is classified as not having CIN3 and/or cancer or as having a low risk of CIN3 and/or cancer development, and wherein the sensitivity of the assay is at least 68.00% and the specificity of the assay is at least 75.00%, preferably wherein the panel of one or more CpGs comprises at least ten CpG from DMR 340, and more preferably wherein the cancer index value is the mean β-value for the CpGs denoted by [[CG]] in SEQ ID NO: 5340;
[1668] 681. CpGs whose cancer index value is determined are located within at least DMR 341 defined by SEQ ID NO: 5341, and wherein when the cancer index for the individual is about 0.056 or more the individual is classified as having CIN3 and/or cancer or as having a high risk of CIN3 and/or cancer development, and wherein the sensitivity of the assay is at least 67.00% and the specificity of the assay is at least 75.00%, preferably wherein the panel of one or more CpGs comprises at least eight CpG from DMR 341, and more preferably wherein the cancer index value is the mean β-value for the CpGs denoted by [[CG]] in SEQ ID NO: 5341;
[1669] 682. CpGs whose cancer index value is determined are located within at least DMR 341 defined by SEQ ID NO: 5341, and wherein when the cancer index for the individual is less than about 0.056 the individual is classified as not having CIN3 and/or cancer or as having a low risk of CIN3 and/or cancer development, and wherein the sensitivity of the assay is at least 67.00% and the specificity of the assay is at least 75.00%, preferably wherein the panel of one or more CpGs comprises at least eight CpG from DMR 341, and more preferably wherein the cancer index value is the mean β-value for the CpGs denoted by [[CG]] in SEQ ID NO: 5341;
[1670] 683. CpGs whose cancer index value is determined are located within at least DMR 342 defined by SEQ ID NO: 5342, and wherein when the cancer index for the individual is about 0.054 or more the individual is classified as having CIN3 and/or cancer or as having a high risk of CIN3 and/or cancer development, and wherein the sensitivity of the assay is at least 67.00% and the specificity of the assay is at least 75.00%, preferably wherein the panel of one or more CpGs comprises at least six CpG from DMR 342, and more preferably wherein the cancer index value is the mean β-value for the CpGs denoted by [[CG]] in SEQ ID NO: 5342;
[1671] 684. CpGs whose cancer index value is determined are located within at least DMR 342 defined by SEQ ID NO: 5342, and wherein when the cancer index for the individual is less than about 0.054 the individual is classified as not having CIN3 and/or cancer or as having a low risk of CIN3 and/or cancer development, and wherein the sensitivity of the assay is at least 67.00% and the specificity of the assay is at least 75.00%, preferably wherein the panel of one or more CpGs comprises at least six CpG from DMR 342, and more preferably wherein the cancer index value is the mean β-value for the CpGs denoted by [[CG]] in SEQ ID NO: 5342;
[1672] 685. CpGs whose cancer index value is determined are located within at least DMR 343 defined by SEQ ID NO: 5343, and wherein when the cancer index for the individual is about 0.033 or more the individual is classified as having CIN3 and/or cancer or as having a high risk of CIN3 and/or cancer development, and wherein the sensitivity of the assay is at least 67.00% and the specificity of the assay is at least 75.00%, preferably wherein the panel of one or more CpGs comprises at least two CpG from DMR 343, and more preferably wherein the cancer index value is the mean β-value for the CpGs denoted by [[CG]] in SEQ ID NO: 5343;
[1673] 686. CpGs whose cancer index value is determined are located within at least DMR 343 defined by SEQ ID NO: 5343, and wherein when the cancer index for the individual is less than about 0.033 the individual is classified as not having CIN3 and/or cancer or as having a low risk of CIN3 and/or cancer development, and wherein the sensitivity of the assay is at least 67.00% and the specificity of the assay is at least 75.00%, preferably wherein the panel of one or more CpGs comprises at least two CpG from DMR 343, and more preferably wherein the cancer index value is the mean β-value for the CpGs denoted by [[CG]] in SEQ ID NO: 5343;
[1674] 687. CpGs whose cancer index value is determined are located within at least DMR 344 defined by SEQ ID NO: 5344, and wherein when the cancer index for the individual is about 0.059 or more the individual is classified as having CIN3 and/or cancer or as having a high risk of CIN3 and/or cancer development, and wherein the sensitivity of the assay is at least 67.00% and the specificity of the assay is at least 75.00%, preferably wherein the panel of one or more CpGs comprises at least eight CpG from DMR 344, and more preferably wherein the cancer index value is the mean β-value for the CpGs denoted by [[CG]] in SEQ ID NO: 5344;
[1675] 688. CpGs whose cancer index value is determined are located within at least DMR 344 defined by SEQ ID NO: 5344, and wherein when the cancer index for the individual is less than about 0.059 the individual is classified as not having CIN3 and/or cancer or as having a low risk of CIN3 and/or cancer development, and wherein the sensitivity of the assay is at least 67.00% and the specificity of the assay is at least 75.00%, preferably wherein the panel of one or more CpGs comprises at least eight CpG from DMR 344, and more preferably wherein the cancer index value is the mean β-value for the CpGs denoted by [[CG]] in SEQ ID NO: 5344;
[1676] 689. CpGs whose cancer index value is determined are located within at least DMR 345 defined by SEQ ID NO: 5345, and wherein when the cancer index for the individual is about 0.049 or more the individual is classified as having CIN3 and/or cancer or as having a high risk of CIN3 and/or cancer development, and wherein the sensitivity of the assay is at least 72.00% and the specificity of the assay is at least 75.00%, preferably wherein the panel of one or more CpGs comprises at least six CpG from DMR 345, and more preferably wherein the cancer index value is the mean β-value for the CpGs denoted by [[CG]] in SEQ ID NO: 5345;
[1677] 690. CpGs whose cancer index value is determined are located within at least DMR 345 defined by SEQ ID NO: 5345, and wherein when the cancer index for the individual is less than about 0.049 the individual is classified as not having CIN3 and/or cancer or as having a low risk of CIN3 and/or cancer development, and wherein the sensitivity of the assay is at least 72.00% and the specificity of the assay is at least 75.00%, preferably wherein the panel of one or more CpGs comprises at least six CpG from DMR 345, and more preferably wherein the cancer index value is the mean β-value for the CpGs denoted by [[CG]] in SEQ ID NO: 5345;
[1678] 691. CpGs whose cancer index value is determined are located within at least DMR 346 defined by SEQ ID NO: 5346, and wherein when the cancer index for the individual is about 0.06 or more the individual is classified as having CIN3 and/or cancer or as having a high risk of CIN3 and/or cancer development, and wherein the sensitivity of the assay is at least 67.00% and the specificity of the assay is at least 75.00%, preferably wherein the panel of one or more CpGs comprises at least four CpG from DMR 346, and more preferably wherein the cancer index value is the mean β-value for the CpGs denoted by [[CG]] in SEQ ID NO: 5346;
[1679] 692. CpGs whose cancer index value is determined are located within at least DMR 346 defined by SEQ ID NO: 5346, and wherein when the cancer index for the individual is less than about 0.06 the individual is classified as not having CIN3 and/or cancer or as having a low risk of CIN3 and/or cancer development, and wherein the sensitivity of the assay is at least 67.00% and the specificity of the assay is at least 75.00%, preferably wherein the panel of one or more CpGs comprises at least four CpG from DMR 346, and more preferably wherein the cancer index value is the mean β-value for the CpGs denoted by [[CG]] in SEQ ID NO: 5346;
[1680] 693. CpGs whose cancer index value is determined are located within at least DMR 347 defined by SEQ ID NO: 5347, and wherein when the cancer index for the individual is about 0.043 or more the individual is classified as having CIN3 and/or cancer or as having a high risk of CIN3 and/or cancer development, and wherein the sensitivity of the assay is at least 64.00% and the specificity of the assay is at least 75.00%, preferably wherein the panel of one or more CpGs comprises at least eight CpG from DMR 347, and more preferably wherein the cancer index value is the mean β-value for the CpGs denoted by [[CG]] in SEQ ID NO: 5347;
[1681] 694. CpGs whose cancer index value is determined are located within at least DMR 347 defined by SEQ ID NO: 5347, and wherein when the cancer index for the individual is less than about 0.043 the individual is classified as not having CIN3 and/or cancer or as having a low risk of CIN3 and/or cancer development, and wherein the sensitivity of the assay is at least 64.00% and the specificity of the assay is at least 75.00%, preferably wherein the panel of one or more CpGs comprises at least eight CpG from DMR 347, and more preferably wherein the cancer index value is the mean β-value for the CpGs denoted by [[CG]] in SEQ ID NO: 5347;
[1682] 695. CpGs whose cancer index value is determined are located within at least DMR 348 defined by SEQ ID NO: 5348, and wherein when the cancer index for the individual is about 0.054 or more the individual is classified as having CIN3 and/or cancer or as having a high risk of CIN3 and/or cancer development, and wherein the sensitivity of the assay is at least 70.00% and the specificity of the assay is at least 75.00%, preferably wherein the panel of one or more CpGs comprises at least nine CpG from DMR 348, and more preferably wherein the cancer index value is the mean β-value for the CpGs denoted by [[CG]] in SEQ ID NO: 5348;
[1683] 696. CpGs whose cancer index value is determined are located within at least DMR 348 defined by SEQ ID NO: 5348, and wherein when the cancer index for the individual is less than about 0.054 the individual is classified as not having CIN3 and/or cancer or as having a low risk of CIN3 and/or cancer development, and wherein the sensitivity of the assay is at least 70.00% and the specificity of the assay is at least 75.00%, preferably wherein the panel of one or more CpGs comprises at least nine CpG from DMR 348, and more preferably wherein the cancer index value is the mean β-value for the CpGs denoted by [[CG]] in SEQ ID NO: 5348;
[1684] 697. CpGs whose cancer index value is determined are located within at least DMR 349 defined by SEQ ID NO: 5349, and wherein when the cancer index for the individual is about 0.054 or more the individual is classified as having CIN3 and/or cancer or as having a high risk of CIN3 and/or cancer development, and wherein the sensitivity of the assay is at least 70.00% and the specificity of the assay is at least 75.00%, preferably wherein the panel of one or more CpGs comprises at least nine CpG from DMR 349, and more preferably wherein the cancer index value is the mean β-value for the CpGs denoted by [[CG]] in SEQ ID NO: 5349;
[1685] 698. CpGs whose cancer index value is determined are located within at least DMR 349 defined by SEQ ID NO: 5349, and wherein when the cancer index for the individual is less than about 0.054 the individual is classified as not having CIN3 and/or cancer or as having a low risk of CIN3 and/or cancer development, and wherein the sensitivity of the assay is at least 70.00% and the specificity of the assay is at least 75.00%, preferably wherein the panel of one or more CpGs comprises at least nine CpG from DMR 349, and more preferably wherein the cancer index value is the mean β-value for the CpGs denoted by [[CG]] in SEQ ID NO: 5349;
[1686] 699. CpGs whose cancer index value is determined are located within at least DMR 350 defined by SEQ ID NO: 5350, and wherein when the cancer index for the individual is about 0.056 or more the individual is classified as having CIN3 and/or cancer or as having a high risk of CIN3 and/or cancer development, and wherein the sensitivity of the assay is at least 67.00% and the specificity of the assay is at least 75.00%, preferably wherein the panel of one or more CpGs comprises at least seven CpG from DMR 350, and more preferably wherein the cancer index value is the mean β-value for the CpGs denoted by [[CG]] in SEQ ID NO: 5350;
[1687] 700. CpGs whose cancer index value is determined are located within at least DMR 350 defined by SEQ ID NO: 5350, and wherein when the cancer index for the individual is less than about 0.056 the individual is classified as not having CIN3 and/or cancer or as having a low risk of CIN3 and/or cancer development, and wherein the sensitivity of the assay is at least 67.00% and the specificity of the assay is at least 75.00%, preferably wherein the panel of one or more CpGs comprises at least seven CpG from DMR 350, and more preferably wherein the cancer index value is the mean β-value for the CpGs denoted by [[CG]] in SEQ ID NO: 5350;
[1688] 701. CpGs whose cancer index value is determined are located within at least DMR 351 defined by SEQ ID NO: 5351, and wherein when the cancer index for the individual is about 0.031 or more the individual is classified as having CIN3 and/or cancer or as having a high risk of CIN3 and/or cancer development, and wherein the sensitivity of the assay is at least 72.00% and the specificity of the assay is at least 75.00%, preferably wherein the panel of one or more CpGs comprises at least three CpG from DMR 351, and more preferably wherein the cancer index value is the mean β-value for the CpGs denoted by [[CG]] in SEQ ID NO: 5351;
[1689] 702. CpGs whose cancer index value is determined are located within at least DMR 351 defined by SEQ ID NO: 5351, and wherein when the cancer index for the individual is less than about 0.031 the individual is classified as not having CIN3 and/or cancer or as having a low risk of CIN3 and/or cancer development, and wherein the sensitivity of the assay is at least 72.00% and the specificity of the assay is at least 75.00%, preferably wherein the panel of one or more CpGs comprises at least three CpG from DMR 351, and more preferably wherein the cancer index value is the mean β-value for the CpGs denoted by [[CG]] in SEQ ID NO: 5351;
[1690] 703. CpGs whose cancer index value is determined are located within at least DMR 352 defined by SEQ ID NO: 5352, and wherein when the cancer index for the individual is about 0.065 or more the individual is classified as having CIN3 and/or cancer or as having a high risk of CIN3 and/or cancer development, and wherein the sensitivity of the assay is at least 69.00% and the specificity of the assay is at least 75.00%, preferably wherein the panel of one or more CpGs comprises at least nine CpG from DMR 352, and more preferably wherein the cancer index value is the mean β-value for the CpGs denoted by [[CG]] in SEQ ID NO: 5352;
[1691] 704. CpGs whose cancer index value is determined are located within at least DMR 352 defined by SEQ ID NO: 5352, and wherein when the cancer index for the individual is less than about 0.065 the individual is classified as not having CIN3 and/or cancer or as having a low risk of CIN3 and/or cancer development, and wherein the sensitivity of the assay is at least 69.00% and the specificity of the assay is at least 75.00%, preferably wherein the panel of one or more CpGs comprises at least nine CpG from DMR 352, and more preferably wherein the cancer index value is the mean β-value for the CpGs denoted by [[CG]] in SEQ ID NO: 5352;
[1692] 705. CpGs whose cancer index value is determined are located within at least DMR 353 defined by SEQ ID NO: 5353, and wherein when the cancer index for the individual is about 0.049 or more the individual is classified as having CIN3 and/or cancer or as having a high risk of CIN3 and/or cancer development, and wherein the sensitivity of the assay is at least 72.00% and the specificity of the assay is at least 75.00%, preferably wherein the panel of one or more CpGs comprises at least six CpG from DMR 353, and more preferably wherein the cancer index value is the mean β-value for the CpGs denoted by [[CG]] in SEQ ID NO: 5353;
[1693] 706. CpGs whose cancer index value is determined are located within at least DMR 353 defined by SEQ ID NO: 5353, and wherein when the cancer index for the individual is less than about 0.049 the individual is classified as not having CIN3 and/or cancer or as having a low risk of CIN3 and/or cancer development, and wherein the sensitivity of the assay is at least 72.00% and the specificity of the assay is at least 75.00%, preferably wherein the panel of one or more CpGs comprises at least six CpG from DMR 353, and more preferably wherein the cancer index value is the mean β-value for the CpGs denoted by [[CG]] in SEQ ID NO: 5353;
[1694] 707. CpGs whose cancer index value is determined are located within at least DMR 354 defined by SEQ ID NO: 5354, and wherein when the cancer index for the individual is about 0.052 or more the individual is classified as having CIN3 and/or cancer or as having a high risk of CIN3 and/or cancer development, and wherein the sensitivity of the assay is at least 69.00% and the specificity of the assay is at least 75.00%, preferably wherein the panel of one or more CpGs comprises at least nine CpG from DMR 354, and more preferably wherein the cancer index value is the mean β-value for the CpGs denoted by [[CG]] in SEQ ID NO: 5354;
[1695] 708. CpGs whose cancer index value is determined are located within at least DMR 354 defined by SEQ ID NO: 5354, and wherein when the cancer index for the individual is less than about 0.052 the individual is classified as not having CIN3 and/or cancer or as having a low risk of CIN3 and/or cancer development, and wherein the sensitivity of the assay is at least 69.00% and the specificity of the assay is at least 75.00%, preferably wherein the panel of one or more CpGs comprises at least nine CpG from DMR 354, and more preferably wherein the cancer index value is the mean β-value for the CpGs denoted by [[CG]] in SEQ ID NO: 5354;
[1696] 709. CpGs whose cancer index value is determined are located within at least DMR 355 defined by SEQ ID NO: 5355, and wherein when the cancer index for the individual is about 0.056 or more the individual is classified as having CIN3 and/or cancer or as having a high risk of CIN3 and/or cancer development, and wherein the sensitivity of the assay is at least 66.00% and the specificity of the assay is at least 75.00%, preferably wherein the panel of one or more CpGs comprises at least five CpG from DMR 355, and more preferably wherein the cancer index value is the mean β-value for the CpGs denoted by [[CG]] in SEQ ID NO: 5355;
[1697] 710. CpGs whose cancer index value is determined are located within at least DMR 355 defined by SEQ ID NO: 5355, and wherein when the cancer index for the individual is less than about 0.056 the individual is classified as not having CIN3 and/or cancer or as having a low risk of CIN3 and/or cancer development, and wherein the sensitivity of the assay is at least 66.00% and the specificity of the assay is at least 75.00%, preferably wherein the panel of one or more CpGs comprises at least five CpG from DMR 355, and more preferably wherein the cancer index value is the mean β-value for the CpGs denoted by [[CG]] in SEQ ID NO: 5355;
[1698] 711. CpGs whose cancer index value is determined are located within at least DMR 356 defined by SEQ ID NO: 5356, and wherein when the cancer index for the individual is about 0.059 or more the individual is classified as having CIN3 and/or cancer or as having a high risk of CIN3 and/or cancer development, and wherein the sensitivity of the assay is at least 67.00% and the specificity of the assay is at least 75.00%, preferably wherein the panel of one or more CpGs comprises at least eight CpG from DMR 356, and more preferably wherein the cancer index value is the mean β-value for the CpGs denoted by [[CG]] in SEQ ID NO: 5356;
[1699] 712. CpGs whose cancer index value is determined are located within at least DMR 356 defined by SEQ ID NO: 5356, and wherein when the cancer index for the individual is less than about 0.059 the individual is classified as not having CIN3 and/or cancer or as having a low risk of CIN3 and/or cancer development, and wherein the sensitivity of the assay is at least 67.00% and the specificity of the assay is at least 75.00%, preferably wherein the panel of one or more CpGs comprises at least eight CpG from DMR 356, and more preferably wherein the cancer index value is the mean β-value for the CpGs denoted by [[CG]] in SEQ ID NO: 5356;
[1700] 713. CpGs whose cancer index value is determined are located within at least DMR 357 defined by SEQ ID NO: 5357, and wherein when the cancer index for the individual is about 0.043 or more the individual is classified as having CIN3 and/or cancer or as having a high risk of CIN3 and/or cancer development, and wherein the sensitivity of the assay is at least 64.00% and the specificity of the assay is at least 75.00%, preferably wherein the panel of one or more CpGs comprises at least eight CpG from DMR 357, and more preferably wherein the cancer index value is the mean β-value for the CpGs denoted by [[CG]] in SEQ ID NO: 5357;
[1701] 714. CpGs whose cancer index value is determined are located within at least DMR 357 defined by SEQ ID NO: 5357, and wherein when the cancer index for the individual is less than about 0.043 the individual is classified as not having CIN3 and/or cancer or as having a low risk of CIN3 and/or cancer development, and wherein the sensitivity of the assay is at least 64.00% and the specificity of the assay is at least 75.00%, preferably wherein the panel of one or more CpGs comprises at least eight CpG from DMR 357, and more preferably wherein the cancer index value is the mean β-value for the CpGs denoted by [[CG]] in SEQ ID NO: 5357;
[1702] 715. CpGs whose cancer index value is determined are located within at least DMR 358 defined by SEQ ID NO: 5358, and wherein when the cancer index for the individual is about 0.05 or more the individual is classified as having CIN3 and/or cancer or as having a high risk of CIN3 and/or cancer development, and wherein the sensitivity of the assay is at least 70.00% and the specificity of the assay is at least 75.00%, preferably wherein the panel of one or more CpGs comprises at least six CpG from DMR 358, and more preferably wherein the cancer index value is the mean β-value for the CpGs denoted by [[CG]] in SEQ ID NO: 5358;
[1703] 716. CpGs whose cancer index value is determined are located within at least DMR 358 defined by SEQ ID NO: 5358, and wherein when the cancer index for the individual is less than about 0.05 the individual is classified as not having CIN3 and/or cancer or as having a low risk of CIN3 and/or cancer development, and wherein the sensitivity of the assay is at least 70.00% and the specificity of the assay is at least 75.00%, preferably wherein the panel of one or more CpGs comprises at least six CpG from DMR 358, and more preferably wherein the cancer index value is the mean β-value for the CpGs denoted by [[CG]] in SEQ ID NO: 5358;
[1704] 717. CpGs whose cancer index value is determined are located within at least DMR 359 defined by SEQ ID NO: 5359, and wherein when the cancer index for the individual is about 0.043 or more the individual is classified as having CIN3 and/or cancer or as having a high risk of CIN3 and/or cancer development, and wherein the sensitivity of the assay is at least 64.00% and the specificity of the assay is at least 75.00%, preferably wherein the panel of one or more CpGs comprises at least eight CpG from DMR 359, and more preferably wherein the cancer index value is the mean β-value for the CpGs denoted by [[CG]] in SEQ ID NO: 5359;
[1705] 718. CpGs whose cancer index value is determined are located within at least DMR 359 defined by SEQ ID NO: 5359, and wherein when the cancer index for the individual is less than about 0.043 the individual is classified as not having CIN3 and/or cancer or as having a low risk of CIN3 and/or cancer development, and wherein the sensitivity of the assay is at least 64.00% and the specificity of the assay is at least 75.00%, preferably wherein the panel of one or more CpGs comprises at least eight CpG from DMR 359, and more preferably wherein the cancer index value is the mean β-value for the CpGs denoted by [[CG]] in SEQ ID NO: 5359;
[1706] 719. CpGs whose cancer index value is determined are located within at least DMR 360 defined by SEQ ID NO: 5360, and wherein when the cancer index for the individual is about 0.059 or more the individual is classified as having CIN3 and/or cancer or as having a high risk of CIN3 and/or cancer development, and wherein the sensitivity of the assay is at least 67.00% and the specificity of the assay is at least 75.00%, preferably wherein the panel of one or more CpGs comprises at least eight CpG from DMR 360, and more preferably wherein the cancer index value is the mean β-value for the CpGs denoted by [[CG]] in SEQ ID NO: 5360;
[1707] 720. CpGs whose cancer index value is determined are located within at least DMR 360 defined by SEQ ID NO: 5360, and wherein when the cancer index for the individual is less than about 0.059 the individual is classified as not having CIN3 and/or cancer or as having a low risk of CIN3 and/or cancer development, and wherein the sensitivity of the assay is at least 67.00% and the specificity of the assay is at least 75.00%, preferably wherein the panel of one or more CpGs comprises at least eight CpG from DMR 360, and more preferably wherein the cancer index value is the mean β-value for the CpGs denoted by [[CG]] in SEQ ID NO: 5360;
[1708] 721. CpGs whose cancer index value is determined are located within at least DMR 361 defined by SEQ ID NO: 5361, and wherein when the cancer index for the individual is about 0.052 or more the individual is classified as having CIN3 and/or cancer or as having a high risk of CIN3 and/or cancer development, and wherein the sensitivity of the assay is at least 69.00% and the specificity of the assay is at least 75.00%, preferably wherein the panel of one or more CpGs comprises at least nine CpG from DMR 361, and more preferably wherein the cancer index value is the mean β-value for the CpGs denoted by [[CG]] in SEQ ID NO: 5361;
[1709] 722. CpGs whose cancer index value is determined are located within at least DMR 361 defined by SEQ ID NO: 5361, and wherein when the cancer index for the individual is less than about 0.052 the individual is classified as not having CIN3 and/or cancer or as having a low risk of CIN3 and/or cancer development, and wherein the sensitivity of the assay is at least 69.00% and the specificity of the assay is at least 75.00%, preferably wherein the panel of one or more CpGs comprises at least nine CpG from DMR 361, and more preferably wherein the cancer index value is the mean β-value for the CpGs denoted by [[CG]] in SEQ ID NO: 5361;
[1710] 723. CpGs whose cancer index value is determined are located within at least DMR 362 defined by SEQ ID NO: 5362, and wherein when the cancer index for the individual is about 0.052 or more the individual is classified as having CIN3 and/or cancer or as having a high risk of CIN3 and/or cancer development, and wherein the sensitivity of the assay is at least 69.00% and the specificity of the assay is at least 75.00%, preferably wherein the panel of one or more CpGs comprises at least nine CpG from DMR 362, and more preferably wherein the cancer index value is the mean β-value for the CpGs denoted by [[CG]] in SEQ ID NO: 5362;
[1711] 724. CpGs whose cancer index value is determined are located within at least DMR 362 defined by SEQ ID NO: 5362, and wherein when the cancer index for the individual is less than about 0.052 the individual is classified as not having CIN3 and/or cancer or as having a low risk of CIN3 and/or cancer development, and wherein the sensitivity of the assay is at least 69.00% and the specificity of the assay is at least 75.00%, preferably wherein the panel of one or more CpGs comprises at least nine CpG from DMR 362, and more preferably wherein the cancer index value is the mean β-value for the CpGs denoted by [[CG]] in SEQ ID NO: 5362;
[1712] 725. CpGs whose cancer index value is determined are located within at least DMR 363 defined by SEQ ID NO: 5363, and wherein when the cancer index for the individual is about 0.043 or more the individual is classified as having CIN3 and/or cancer or as having a high risk of CIN3 and/or cancer development, and wherein the sensitivity of the assay is at least 64.00% and the specificity of the assay is at least 75.00%, preferably wherein the panel of one or more CpGs comprises at least eight CpG from DMR 363, and more preferably wherein the cancer index value is the mean β-value for the CpGs denoted by [[CG]] in SEQ ID NO: 5363;
[1713] 726. CpGs whose cancer index value is determined are located within at least DMR 363 defined by SEQ ID NO: 5363, and wherein when the cancer index for the individual is less than about 0.043 the individual is classified as not having CIN3 and/or cancer or as having a low risk of CIN3 and/or cancer development, and wherein the sensitivity of the assay is at least 64.00% and the specificity of the assay is at least 75.00%, preferably wherein the panel of one or more CpGs comprises at least eight CpG from DMR 363, and more preferably wherein the cancer index value is the mean β-value for the CpGs denoted by [[CG]] in SEQ ID NO: 5363;
[1714] 727. CpGs whose cancer index value is determined are located within at least DMR 364 defined by SEQ ID NO: 5364, and wherein when the cancer index for the individual is about 0.02 or more the individual is classified as having CIN3 and/or cancer or as having a high risk of CIN3 and/or cancer development, and wherein the sensitivity of the assay is at least 70.00% and the specificity of the assay is at least 75.00%, preferably wherein the panel of one or more CpGs comprises at least five CpG from DMR 364, and more preferably wherein the cancer index value is the mean β-value for the CpGs denoted by [[CG]] in SEQ ID NO: 5364;
[1715] 728. CpGs whose cancer index value is determined are located within at least DMR 364 defined by SEQ ID NO: 5364, and wherein when the cancer index for the individual is less than about 0.02 the individual is classified as not having CIN3 and/or cancer or as having a low risk of CIN3 and/or cancer development, and wherein the sensitivity of the assay is at least 70.00% and the specificity of the assay is at least 75.00%, preferably wherein the panel of one or more CpGs comprises at least five CpG from DMR 364, and more preferably wherein the cancer index value is the mean β-value for the CpGs denoted by [[CG]] in SEQ ID NO: 5364;
[1716] 729. CpGs whose cancer index value is determined are located within at least DMR 365 defined by SEQ ID NO: 5365, and wherein when the cancer index for the individual is about 0.029 or more the individual is classified as having CIN3 and/or cancer or as having a high risk of CIN3 and/or cancer development, and wherein the sensitivity of the assay is at least 68.00% and the specificity of the assay is at least 75.00%, preferably wherein the panel of one or more CpGs comprises at least six CpG from DMR 365, and more preferably wherein the cancer index value is the mean β-value for the CpGs denoted by [[CG]] in SEQ ID NO: 5365;
[1717] 730. CpGs whose cancer index value is determined are located within at least DMR 365 defined by SEQ ID NO: 5365, and wherein when the cancer index for the individual is less than about 0.029 the individual is classified as not having CIN3 and/or cancer or as having a low risk of CIN3 and/or cancer development, and wherein the sensitivity of the assay is at least 68.00% and the specificity of the assay is at least 75.00%, preferably wherein the panel of one or more CpGs comprises at least six CpG from DMR 365, and more preferably wherein the cancer index value is the mean β-value for the CpGs denoted by [[CG]] in SEQ ID NO: 5365;
[1718] 731. CpGs whose cancer index value is determined are located within at least DMR 366 defined by SEQ ID NO: 5366, and wherein when the cancer index for the individual is about 0.052 or more the individual is classified as having CIN3 and/or cancer or as having a high risk of CIN3 and/or cancer development, and wherein the sensitivity of the assay is at least 69.00% and the specificity of the assay is at least 75.00%, preferably wherein the panel of one or more CpGs comprises at least nine CpG from DMR 366, and more preferably wherein the cancer index value is the mean β-value for the CpGs denoted by [[CG]] in SEQ ID NO: 5366;
[1719] 732. CpGs whose cancer index value is determined are located within at least DMR 366 defined by SEQ ID NO: 5366, and wherein when the cancer index for the individual is less than about 0.052 the individual is classified as not having CIN3 and/or cancer or as having a low risk of CIN3 and/or cancer development, and wherein the sensitivity of the assay is at least 69.00% and the specificity of the assay is at least 75.00%, preferably wherein the panel of one or more CpGs comprises at least nine CpG from DMR 366, and more preferably wherein the cancer index value is the mean β-value for the CpGs denoted by [[CG]] in SEQ ID NO: 5366;
[1720] 733. CpGs whose cancer index value is determined are located within at least DMR 367 defined by SEQ ID NO: 5367, and wherein when the cancer index for the individual is about 0.043 or more the individual is classified as having CIN3 and/or cancer or as having a high risk of CIN3 and/or cancer development, and wherein the sensitivity of the assay is at least 64.00% and the specificity of the assay is at least 75.00%, preferably wherein the panel of one or more CpGs comprises at least eight CpG from DMR 367, and more preferably wherein the cancer index value is the mean β-value for the CpGs denoted by [[CG]] in SEQ ID NO: 5367;
[1721] 734. CpGs whose cancer index value is determined are located within at least DMR 367 defined by SEQ ID NO: 5367, and wherein when the cancer index for the individual is less than about 0.043 the individual is classified as not having CIN3 and/or cancer or as having a low risk of CIN3 and/or cancer development, and wherein the sensitivity of the assay is at least 64.00% and the specificity of the assay is at least 75.00%, preferably wherein the panel of one or more CpGs comprises at least eight CpG from DMR 367, and more preferably wherein the cancer index value is the mean β-value for the CpGs denoted by [[CG]] in SEQ ID NO: 5367;
[1722] 735. CpGs whose cancer index value is determined are located within at least DMR 368 defined by SEQ ID NO: 5368, and wherein when the cancer index for the individual is about 0.052 or more the individual is classified as having CIN3 and/or cancer or as having a high risk of CIN3 and/or cancer development, and wherein the sensitivity of the assay is at least 69.00% and the specificity of the assay is at least 75.00%, preferably wherein the panel of one or more CpGs comprises at least nine CpG from DMR 368, and more preferably wherein the cancer index value is the mean β-value for the CpGs denoted by [[CG]] in SEQ ID NO: 5368;
[1723] 736. CpGs whose cancer index value is determined are located within at least DMR 368 defined by SEQ ID NO: 5368, and wherein when the cancer index for the individual is less than about 0.052 the individual is classified as not having CIN3 and/or cancer or as having a low risk of CIN3 and/or cancer development, and wherein the sensitivity of the assay is at least 69.00% and the specificity of the assay is at least 75.00%, preferably wherein the panel of one or more CpGs comprises at least nine CpG from DMR 368, and more preferably wherein the cancer index value is the mean β-value for the CpGs denoted by [[CG]] in SEQ ID NO: 5368;
[1724] 737. CpGs whose cancer index value is determined are located within at least DMR 369 defined by SEQ ID NO: 5369, and wherein when the cancer index for the individual is about 0.034 or more the individual is classified as having CIN3 and/or cancer or as having a high risk of CIN3 and/or cancer development, and wherein the sensitivity of the assay is at least 71.00% and the specificity of the assay is at least 75.00%, preferably wherein the panel of one or more CpGs comprises at least nine CpG from DMR 369, and more preferably wherein the cancer index value is the mean β-value for the CpGs denoted by [[CG]] in SEQ ID NO: 5369;
[1725] 738. CpGs whose cancer index value is determined are located within at least DMR 369 defined by SEQ ID NO: 5369, and wherein when the cancer index for the individual is less than about 0.034 the individual is classified as not having CIN3 and/or cancer or as having a low risk of CIN3 and/or cancer development, and wherein the sensitivity of the assay is at least 71.00% and the specificity of the assay is at least 75.00%, preferably wherein the panel of one or more CpGs comprises at least nine CpG from DMR 369, and more preferably wherein the cancer index value is the mean β-value for the CpGs denoted by [[CG]] in SEQ ID NO: 5369;
[1726] 739. CpGs whose cancer index value is determined are located within at least DMR 370 defined by SEQ ID NO: 5370, and wherein when the cancer index for the individual is about 0.034 or more the individual is classified as having CIN3 and/or cancer or as having a high risk of CIN3 and/or cancer development, and wherein the sensitivity of the assay is at least 71.00% and the specificity of the assay is at least 75.00%, preferably wherein the panel of one or more CpGs comprises at least nine CpG from DMR 370, and more preferably wherein the cancer index value is the mean β-value for the CpGs denoted by [[CG]] in SEQ ID NO: 5370;
[1727] 740. CpGs whose cancer index value is determined are located within at least DMR 370 defined by SEQ ID NO: 5370, and wherein when the cancer index for the individual is less than about 0.034 the individual is classified as not having CIN3 and/or cancer or as having a low risk of CIN3 and/or cancer development, and wherein the sensitivity of the assay is at least 71.00% and the specificity of the assay is at least 75.00%, preferably wherein the panel of one or more CpGs comprises at least nine CpG from DMR 370, and more preferably wherein the cancer index value is the mean β-value for the CpGs denoted by [[CG]] in SEQ ID NO: 5370;
[1728] 741. CpGs whose cancer index value is determined are located within at least DMR 371 defined by SEQ ID NO: 5371, and wherein when the cancer index for the individual is about 0.031 or more the individual is classified as having CIN3 and/or cancer or as having a high risk of CIN3 and/or cancer development, and wherein the sensitivity of the assay is at least 72.00% and the specificity of the assay is at least 75.00%, preferably wherein the panel of one or more CpGs comprises at least three CpG from DMR 371, and more preferably wherein the cancer index value is the mean β-value for the CpGs denoted by [[CG]] in SEQ ID NO: 5371;
[1729] 742. CpGs whose cancer index value is determined are located within at least DMR 371 defined by SEQ ID NO: 5371, and wherein when the cancer index for the individual is less than about 0.031 the individual is classified as not having CIN3 and/or cancer or as having a low risk of CIN3 and/or cancer development, and wherein the sensitivity of the assay is at least 72.00% and the specificity of the assay is at least 75.00%, preferably wherein the panel of one or more CpGs comprises at least three CpG from DMR 371, and more preferably wherein the cancer index value is the mean β-value for the CpGs denoted by [[CG]] in SEQ ID NO: 5371;
[1730] 743. CpGs whose cancer index value is determined are located within at least DMR 372 defined by SEQ ID NO: 5372, and wherein when the cancer index for the individual is about 0.031 or more the individual is classified as having CIN3 and/or cancer or as having a high risk of CIN3 and/or cancer development, and wherein the sensitivity of the assay is at least 72.00% and the specificity of the assay is at least 75.00%, preferably wherein the panel of one or more CpGs comprises at least three CpG from DMR 372, and more preferably wherein the cancer index value is the mean β-value for the CpGs denoted by [[CG]] in SEQ ID NO: 5372;
[1731] 744. CpGs whose cancer index value is determined are located within at least DMR 372 defined by SEQ ID NO: 5372, and wherein when the cancer index for the individual is less than about 0.031 the individual is classified as not having CIN3 and/or cancer or as having a low risk of CIN3 and/or cancer development, and wherein the sensitivity of the assay is at least 72.00% and the specificity of the assay is at least 75.00%, preferably wherein the panel of one or more CpGs comprises at least three CpG from DMR 372, and more preferably wherein the cancer index value is the mean β-value for the CpGs denoted by [[CG]] in SEQ ID NO: 5372;
[1732] 745. CpGs whose cancer index value is determined are located within at least DMR 373 defined by SEQ ID NO: 5373, and wherein when the cancer index for the individual is about 0.072 or more the individual is classified as having CIN3 and/or cancer or as having a high risk of CIN3 and/or cancer development, and wherein the sensitivity of the assay is at least 64.00% and the specificity of the assay is at least 75.00%, preferably wherein the panel of one or more CpGs comprises at least three CpG from DMR 373, and more preferably wherein the cancer index value is the mean β-value for the CpGs denoted by [[CG]] in SEQ ID NO: 5373;
[1733] 746. CpGs whose cancer index value is determined are located within at least DMR 373 defined by SEQ ID NO: 5373, and wherein when the cancer index for the individual is less than about 0.072 the individual is classified as not having CIN3 and/or cancer or as having a low risk of CIN3 and/or cancer development, and wherein the sensitivity of the assay is at least 64.00% and the specificity of the assay is at least 75.00%, preferably wherein the panel of one or more CpGs comprises at least three CpG from DMR 373, and more preferably wherein the cancer index value is the mean β-value for the CpGs denoted by [[CG]] in SEQ ID NO: 5373;
[1734] 747. CpGs whose cancer index value is determined are located within at least DMR 374 defined by SEQ ID NO: 5374, and wherein when the cancer index for the individual is about 0.058 or more the individual is classified as having CIN3 and/or cancer or as having a high risk of CIN3 and/or cancer development, and wherein the sensitivity of the assay is at least 67.00% and the specificity of the assay is at least 75.00%, preferably wherein the panel of one or more CpGs comprises at least two CpG from DMR 374, and more preferably wherein the cancer index value is the mean β-value for the CpGs denoted by [[CG]] in SEQ ID NO: 5374;
[1735] 748. CpGs whose cancer index value is determined are located within at least DMR 374 defined by SEQ ID NO: 5374, and wherein when the cancer index for the individual is less than about 0.058 the individual is classified as not having CIN3 and/or cancer or as having a low risk of CIN3 and/or cancer development, and wherein the sensitivity of the assay is at least 67.00% and the specificity of the assay is at least 75.00%, preferably wherein the panel of one or more CpGs comprises at least two CpG from DMR 374, and more preferably wherein the cancer index value is the mean β-value for the CpGs denoted by [[CG]] in SEQ ID NO: 5374;
[1736] 749. CpGs whose cancer index value is determined are located within at least DMR 375 defined by SEQ ID NO: 5375, and wherein when the cancer index for the individual is about 0.061 or more the individual is classified as having CIN3 and/or cancer or as having a high risk of CIN3 and/or cancer development, and wherein the sensitivity of the assay is at least 67.00% and the specificity of the assay is at least 75.00%, preferably wherein the panel of one or more CpGs comprises at least nine CpG from DMR 375, and more preferably wherein the cancer index value is the mean β-value for the CpGs denoted by [[CG]] in SEQ ID NO: 5375;
[1737] 750. CpGs whose cancer index value is determined are located within at least DMR 375 defined by SEQ ID NO: 5375, and wherein when the cancer index for the individual is less than about 0.061 the individual is classified as not having CIN3 and/or cancer or as having a low risk of CIN3 and/or cancer development, and wherein the sensitivity of the assay is at least 67.00% and the specificity of the assay is at least 75.00%, preferably wherein the panel of one or more CpGs comprises at least nine CpG from DMR 375, and more preferably wherein the cancer index value is the mean β-value for the CpGs denoted by [[CG]] in SEQ ID NO: 5375;
[1738] 751. CpGs whose cancer index value is determined are located within at least DMR 376 defined by SEQ ID NO: 5376, and wherein when the cancer index for the individual is about 0.048 or more the individual is classified as having CIN3 and/or cancer or as having a high risk of CIN3 and/or cancer development, and wherein the sensitivity of the assay is at least 67.00% and the specificity of the assay is at least 75.00%, preferably wherein the panel of one or more CpGs comprises at least nine CpG from DMR 376, and more preferably wherein the cancer index value is the mean β-value for the CpGs denoted by [[CG]] in SEQ ID NO: 5376;
[1739] 752. CpGs whose cancer index value is determined are located within at least DMR 376 defined by SEQ ID NO: 5376, and wherein when the cancer index for the individual is less than about 0.048 the individual is classified as not having CIN3 and/or cancer or as having a low risk of CIN3 and/or cancer development, and wherein the sensitivity of the assay is at least 67.00% and the specificity of the assay is at least 75.00%, preferably wherein the panel of one or more CpGs comprises at least nine CpG from DMR 376, and more preferably wherein the cancer index value is the mean β-value for the CpGs denoted by [[CG]] in SEQ ID NO: 5376;
[1740] 753. CpGs whose cancer index value is determined are located within at least DMR 377 defined by SEQ ID NO: 5377, and wherein when the cancer index for the individual is about 0.051 or more the individual is classified as having CIN3 and/or cancer or as having a high risk of CIN3 and/or cancer development, and wherein the sensitivity of the assay is at least 67.00% and the specificity of the assay is at least 75.00%, preferably wherein the panel of one or more CpGs comprises at least five CpG from DMR 377, and more preferably wherein the cancer index value is the mean β-value for the CpGs denoted by [[CG]] in SEQ ID NO: 5377;
[1741] 754. CpGs whose cancer index value is determined are located within at least DMR 377 defined by SEQ ID NO: 5377, and wherein when the cancer index for the individual is less than about 0.051 the individual is classified as not having CIN3 and/or cancer or as having a low risk of CIN3 and/or cancer development, and wherein the sensitivity of the assay is at least 67.00% and the specificity of the assay is at least 75.00%, preferably wherein the panel of one or more CpGs comprises at least five CpG from DMR 377, and more preferably wherein the cancer index value is the mean β-value for the CpGs denoted by [[CG]] in SEQ ID NO: 5377;
[1742] 755. CpGs whose cancer index value is determined are located within at least DMR 378 defined by SEQ ID NO: 5378, and wherein when the cancer index for the individual is about 0.048 or more the individual is classified as having CIN3 and/or cancer or as having a high risk of CIN3 and/or cancer development, and wherein the sensitivity of the assay is at least 67.00% and the specificity of the assay is at least 75.00%, preferably wherein the panel of one or more CpGs comprises at least nine CpG from DMR 378, and more preferably wherein the cancer index value is the mean β-value for the CpGs denoted by [[CG]] in SEQ ID NO: 5378;
[1743] 756. CpGs whose cancer index value is determined are located within at least DMR 378 defined by SEQ ID NO: 5378, and wherein when the cancer index for the individual is less than about 0.048 the individual is classified as not having CIN3 and/or cancer or as having a low risk of CIN3 and/or cancer development, and wherein the sensitivity of the assay is at least 67.00% and the specificity of the assay is at least 75.00%, preferably wherein the panel of one or more CpGs comprises at least nine CpG from DMR 378, and more preferably wherein the cancer index value is the mean β-value for the CpGs denoted by [[CG]] in SEQ ID NO: 5378;
[1744] 757. CpGs whose cancer index value is determined are located within at least DMR 379 defined by SEQ ID NO: 5379, and wherein when the cancer index for the individual is about 0.048 or more the individual is classified as having CIN3 and/or cancer or as having a high risk of CIN3 and/or cancer development, and wherein the sensitivity of the assay is at least 67.00% and the specificity of the assay is at least 75.00%, preferably wherein the panel of one or more CpGs comprises at least nine CpG from DMR 379, and more preferably wherein the cancer index value is the mean β-value for the CpGs denoted by [[CG]] in SEQ ID NO: 5379;
[1745] 758. CpGs whose cancer index value is determined are located within at least DMR 379 defined by SEQ ID NO: 5379, and wherein when the cancer index for the individual is less than about 0.048 the individual is classified as not having CIN3 and/or cancer or as having a low risk of CIN3 and/or cancer development, and wherein the sensitivity of the assay is at least 67.00% and the specificity of the assay is at least 75.00%, preferably wherein the panel of one or more CpGs comprises at least nine CpG from DMR 379, and more preferably wherein the cancer index value is the mean β-value for the CpGs denoted by [[CG]] in SEQ ID NO: 5379;
[1746] 759. CpGs whose cancer index value is determined are located within at least DMR 380 defined by SEQ ID NO: 5380, and wherein when the cancer index for the individual is about 0.028 or more the individual is classified as having CIN3 and/or cancer or as having a high risk of CIN3 and/or cancer development, and wherein the sensitivity of the assay is at least 64.00% and the specificity of the assay is at least 75.00%, preferably wherein the panel of one or more CpGs comprises at least four CpG from DMR 380, and more preferably wherein the cancer index value is the mean β-value for the CpGs denoted by [[CG]] in SEQ ID NO: 5380;
[1747] 760. CpGs whose cancer index value is determined are located within at least DMR 380 defined by SEQ ID NO: 5380, and wherein when the cancer index for the individual is less than about 0.028 the individual is classified as not having CIN3 and/or cancer or as having a low risk of CIN3 and/or cancer development, and wherein the sensitivity of the assay is at least 64.00% and the specificity of the assay is at least 75.00%, preferably wherein the panel of one or more CpGs comprises at least four CpG from DMR 380, and more preferably wherein the cancer index value is the mean β-value for the CpGs denoted by [[CG]] in SEQ ID NO: 5380;
[1748] 761. CpGs whose cancer index value is determined are located within at least DMR 381 defined by SEQ ID NO: 5381, and wherein when the cancer index for the individual is about 0.028 or more the individual is classified as having CIN3 and/or cancer or as having a high risk of CIN3 and/or cancer development, and wherein the sensitivity of the assay is at least 64.00% and the specificity of the assay is at least 75.00%, preferably wherein the panel of one or more CpGs comprises at least four CpG from DMR 381, and more preferably wherein the cancer index value is the mean β-value for the CpGs denoted by [[CG]] in SEQ ID NO: 5381;
[1749] 762. CpGs whose cancer index value is determined are located within at least DMR 381 defined by SEQ ID NO: 5381, and wherein when the cancer index for the individual is less than about 0.028 the individual is classified as not having CIN3 and/or cancer or as having a low risk of CIN3 and/or cancer development, and wherein the sensitivity of the assay is at least 64.00% and the specificity of the assay is at least 75.00%, preferably wherein the panel of one or more CpGs comprises at least four CpG from DMR 381, and more preferably wherein the cancer index value is the mean β-value for the CpGs denoted by [[CG]] in SEQ ID NO: 5381;
[1750] 763. CpGs whose cancer index value is determined are located within at least DMR 382 defined by SEQ ID NO: 5382, and wherein when the cancer index for the individual is about 0.028 or more the individual is classified as having CIN3 and/or cancer or as having a high risk of CIN3 and/or cancer development, and wherein the sensitivity of the assay is at least 64.00% and the specificity of the assay is at least 75.00%, preferably wherein the panel of one or more CpGs comprises at least four CpG from DMR 382, and more preferably wherein the cancer index value is the mean β-value for the CpGs denoted by [[CG]] in SEQ ID NO: 5382;
[1751] 764. CpGs whose cancer index value is determined are located within at least DMR 382 defined by SEQ ID NO: 5382, and wherein when the cancer index for the individual is less than about 0.028 the individual is classified as not having CIN3 and/or cancer or as having a low risk of CIN3 and/or cancer development, and wherein the sensitivity of the assay is at least 64.00% and the specificity of the assay is at least 75.00%, preferably wherein the panel of one or more CpGs comprises at least four CpG from DMR 382, and more preferably wherein the cancer index value is the mean β-value for the CpGs denoted by [[CG]] in SEQ ID NO: 5382;
[1752] 765. CpGs whose cancer index value is determined are located within at least DMR 383 defined by SEQ ID NO: 5383, and wherein when the cancer index for the individual is about 0.048 or more the individual is classified as having CIN3 and/or cancer or as having a high risk of CIN3 and/or cancer development, and wherein the sensitivity of the assay is at least 67.00% and the specificity of the assay is at least 75.00%, preferably wherein the panel of one or more CpGs comprises at least nine CpG from DMR 383, and more preferably wherein the cancer index value is the mean β-value for the CpGs denoted by [[CG]] in SEQ ID NO: 5383;
[1753] 766. CpGs whose cancer index value is determined are located within at least DMR 383 defined by SEQ ID NO: 5383, and wherein when the cancer index for the individual is less than about 0.048 the individual is classified as not having CIN3 and/or cancer or as having a low risk of CIN3 and/or cancer development, and wherein the sensitivity of the assay is at least 67.00% and the specificity of the assay is at least 75.00%, preferably wherein the panel of one or more CpGs comprises at least nine CpG from DMR 383, and more preferably wherein the cancer index value is the mean β-value for the CpGs denoted by [[CG]] in SEQ ID NO: 5383;
[1754] 767. CpGs whose cancer index value is determined are located within at least DMR 384 defined by SEQ ID NO: 5384, and wherein when the cancer index for the individual is about 0.048 or more the individual is classified as having CIN3 and/or cancer or as having a high risk of CIN3 and/or cancer development, and wherein the sensitivity of the assay is at least 67.00% and the specificity of the assay is at least 75.00%, preferably wherein the panel of one or more CpGs comprises at least nine CpG from DMR 384, and more preferably wherein the cancer index value is the mean β-value for the CpGs denoted by [[CG]] in SEQ ID NO: 5384;
[1755] 768. CpGs whose cancer index value is determined are located within at least DMR 384 defined by SEQ ID NO: 5384, and wherein when the cancer index for the individual is less than about 0.048 the individual is classified as not having CIN3 and/or cancer or as having a low risk of CIN3 and/or cancer development, and wherein the sensitivity of the assay is at least 67.00% and the specificity of the assay is at least 75.00%, preferably wherein the panel of one or more CpGs comprises at least nine CpG from DMR 384, and more preferably wherein the cancer index value is the mean β-value for the CpGs denoted by [[CG]] in SEQ ID NO: 5384;
[1756] 769. CpGs whose cancer index value is determined are located within at least DMR 385 defined by SEQ ID NO: 5385, and wherein when the cancer index for the individual is about 0.021 or more the individual is classified as having CIN3 and/or cancer or as having a high risk of CIN3 and/or cancer development, and wherein the sensitivity of the assay is at least 67.00% and the specificity of the assay is at least 75.00%, preferably wherein the panel of one or more CpGs comprises at least four CpG from DMR 385, and more preferably wherein the cancer index value is the mean β-value for the CpGs denoted by [[CG]] in SEQ ID NO: 5385;
[1757] 770. CpGs whose cancer index value is determined are located within at least DMR 385 defined by SEQ ID NO: 5385, and wherein when the cancer index for the individual is less than about 0.021 the individual is classified as not having CIN3 and/or cancer or as having a low risk of CIN3 and/or cancer development, and wherein the sensitivity of the assay is at least 67.00% and the specificity of the assay is at least 75.00%, preferably wherein the panel of one or more CpGs comprises at least four CpG from DMR 385, and more preferably wherein the cancer index value is the mean β-value for the CpGs denoted by [[CG]] in SEQ ID NO: 5385;
[1758] 771. CpGs whose cancer index value is determined are located within at least DMR 386 defined by SEQ ID NO: 5386, and wherein when the cancer index for the individual is about 0.021 or more the individual is classified as having CIN3 and/or cancer or as having a high risk of CIN3 and/or cancer development, and wherein the sensitivity of the assay is at least 67.00% and the specificity of the assay is at least 75.00%, preferably wherein the panel of one or more CpGs comprises at least four CpG from DMR 386, and more preferably wherein the cancer index value is the mean β-value for the CpGs denoted by [[CG]] in SEQ ID NO: 5388;
[1759] 772. CpGs whose cancer index value is determined are located within at least DMR 386 defined by SEQ ID NO: 5386, and wherein when the cancer index for the individual is less than about 0.021 the individual is classified as not having CIN3 and/or cancer or as having a low risk of CIN3 and/or cancer development, and wherein the sensitivity of the assay is at least 67.00% and the specificity of the assay is at least 75.00%, preferably wherein the panel of one or more CpGs comprises at least four CpG from DMR 386, and more preferably wherein the cancer index value is the mean β-value for the CpGs denoted by [[CG]] in SEQ ID NO: 5388;
[1760] 773. CpGs whose cancer index value is determined are located within at least DMR 387 defined by SEQ ID NO: 5387, and wherein when the cancer index for the individual is about 0.047 or more the individual is classified as having CIN3 and/or cancer or as having a high risk of CIN3 and/or cancer development, and wherein the sensitivity of the assay is at least 74.00% and the specificity of the assay is at least 75.00%, preferably wherein the panel of one or more CpGs comprises at least four CpG from DMR 387, and more preferably wherein the cancer index value is the mean β-value for the CpGs denoted by [[CG]] in SEQ ID NO: 5387;
[1761] 774. CpGs whose cancer index value is determined are located within at least DMR 387 defined by SEQ ID NO: 5387, and wherein when the cancer index for the individual is less than about 0.047 or more the individual is classified as not having cancer or as having a low risk of cancer development, and wherein the sensitivity of the assay is at least 74.00% and the specificity of the assay is at least 75.00%, preferably wherein the panel of one or more CpGs comprises at least four CpG from DMR 387, and more preferably wherein the cancer index value is the mean β-value for the CpGs denoted by [[CG]] in SEQ ID NO: 5387;
[1762] 775. CpGs whose cancer index value is determined are located within at least DMR 388 defined by SEQ ID NO: 5388, and wherein when the cancer index for the individual is about 0.047 or more the individual is classified as having CIN3 and/or cancer or as having a high risk of CIN3 and/or cancer development, and wherein the sensitivity of the assay is at least 74.00% and the specificity of the assay is at least 75.00%, preferably wherein the panel of one or more CpGs comprises at least four CpG from DMR 388, and more preferably wherein the cancer index value is the mean β-value for the CpGs denoted by [[CG]] in SEQ ID NO: 5388;
[1763] 776. CpGs whose cancer index value is determined are located within at least DMR 388 defined by SEQ ID NO: 5388, and wherein when the cancer index for the individual is less than about 0.047 the individual is classified as not having CIN3 and/or cancer or as having a low risk of CIN3 and/or cancer development, and wherein the sensitivity of the assay is at least 74.00% and the specificity of the assay is at least 75.00%, preferably wherein the panel of one or more CpGs comprises at least four CpG from DMR 388, and more preferably wherein the cancer index value is the mean β-value for the CpGs denoted by [[CG]] in SEQ ID NO: 5388;
[1764] 777. CpGs whose cancer index value is determined are located within at least DMR 389 defined by SEQ ID NO: 5389, and wherein when the cancer index for the individual is about 0.042 or more the individual is classified as having CIN3 and/or cancer or as having a high risk of CIN3 and/or cancer development, and wherein the sensitivity of the assay is at least 66.00% and the specificity of the assay is at least 75.00%, preferably wherein the panel of one or more CpGs comprises at least nine CpG from DMR 389, and more preferably wherein the cancer index value is the mean β-value for the CpGs denoted by [[CG]] in SEQ ID NO: 5389;
[1765] 778. CpGs whose cancer index value is determined are located within at least DMR 389 defined by SEQ ID NO: 5389, and wherein when the cancer index for the individual is less than about 0.042 the individual is classified as not having CIN3 and/or cancer or as having a low risk of CIN3 and/or cancer development, and wherein the sensitivity of the assay is at least 66.00% and the specificity of the assay is at least 75.00%, preferably wherein the panel of one or more CpGs comprises at least nine CpG from DMR 389, and more preferably wherein the cancer index value is the mean β-value for the CpGs denoted by [[CG]] in SEQ ID NO: 5389;
[1766] 779. CpGs whose cancer index value is determined are located within at least DMR 390 defined by SEQ ID NO: 5390, and wherein when the cancer index for the individual is about 0.048 or more the individual is classified as having CIN3 and/or cancer or as having a high risk of CIN3 and/or cancer development, and wherein the sensitivity of the assay is at least 67.00% and the specificity of the assay is at least 75.00%, preferably wherein the panel of one or more CpGs comprises at least nine CpG from DMR 390, and more preferably wherein the cancer index value is the mean β-value for the CpGs denoted by [[CG]] in SEQ ID NO: 5390;
[1767] 780. CpGs whose cancer index value is determined are located within at least DMR 390 defined by SEQ ID NO: 5390, and wherein when the cancer index for the individual is less than about 0.048 or more the individual is classified as not having cancer or as having a low risk of cancer development, and wherein the sensitivity of the assay is at least 67.00% and the specificity of the assay is at least 75.00%, preferably wherein the panel of one or more CpGs comprises at least nine CpG from DMR 390, and more preferably wherein the cancer index value is the mean β-value for the CpGs denoted by [[CG]] in SEQ ID NO: 5390;
[1768] 781. CpGs whose cancer index value is determined are located within at least DMR 391 defined by SEQ ID NO: 5391, and wherein when the cancer index for the individual is about 0.048 or more the individual is classified as having CIN3 and/or cancer or as having a high risk of CIN3 and/or cancer development, and wherein the sensitivity of the assay is at least 80.00% and the specificity of the assay is at least 75.00%, preferably wherein the panel of one or more CpGs comprises at least nine CpG from DMR 391, and more preferably wherein the cancer index value is the mean β-value for the CpGs denoted by [[CG]] in SEQ ID NO: 5391;
[1769] 782. CpGs whose cancer index value is determined are located within at least DMR 391 defined by SEQ ID NO: 5391, and wherein when the cancer index for the individual is less than about 0.048 or more the individual is classified as not having cancer or as having a low risk of cancer development, and wherein the sensitivity of the assay is at least 80.00% and the specificity of the assay is at least 75.00%, preferably wherein the panel of one or more CpGs comprises at least nine CpG from DMR 391, and more preferably wherein the cancer index value is the mean β-value for the CpGs denoted by [[CG]] in SEQ ID NO: 5391;
[1770] 783. CpGs whose cancer index value is determined are located within at least DMR 392 defined by SEQ ID NO: 5392, and wherein when the cancer index for the individual is about 0.027 or more the individual is classified as having CIN3 and/or cancer or as having a high risk of CIN3 and/or cancer development, and wherein the sensitivity of the assay is at least 83.00% and the specificity of the assay is at least 75.00%, preferably wherein the panel of one or more CpGs comprises at least nine CpG from DMR 392, and more preferably wherein the cancer index value is the mean β-value for the CpGs denoted by [[CG]] in SEQ ID NO: 5392;
[1771] 784. CpGs whose cancer index value is determined are located within at least DMR 392 defined by SEQ ID NO: 5392, and wherein when the cancer index for the individual is less than about 0.027 or more the individual is classified as not having cancer or as having a low risk of cancer development, and wherein the sensitivity of the assay is at least 83.00% and the specificity of the assay is at least 75.00%, preferably wherein the panel of one or more CpGs comprises at least nine CpG from DMR 392, and more preferably wherein the cancer index value is the mean β-value for the CpGs denoted by [[CG]] in SEQ ID NO: 5392;
[1772] 785. CpGs whose cancer index value is determined are located within at least DMR 393 defined by SEQ ID NO: 5393, and wherein when the cancer index for the individual is about 0.038 or more the individual is classified as having CIN3 and/or cancer or as having a high risk of CIN3 and/or cancer development, and wherein the sensitivity of the assay is at least 80.00% and the specificity of the assay is at least 75.00%, preferably wherein the panel of one or more CpGs comprises at least nine CpG from DMR 393, and more preferably wherein the cancer index value is the mean β-value for the CpGs denoted by [[CG]] in SEQ ID NO: 5393;
[1773] 786. CpGs whose cancer index value is determined are located within at least DMR 393 defined by SEQ ID NO: 5393, and wherein when the cancer index for the individual is less than about 0.038 or more the individual is classified as not having cancer or as having a low risk of cancer development, and wherein the sensitivity of the assay is at least 80.00% and the specificity of the assay is at least 75.00%, preferably wherein the panel of one or more CpGs comprises at least nine CpG from DMR 393, and more preferably wherein the cancer index value is the mean β-value for the CpGs denoted by [[CG]] in SEQ ID NO: 5393;
[1774] 787. CpGs whose cancer index value is determined are located within at least DMR 394 defined by SEQ ID NO: 5394, and wherein when the cancer index for the individual is about 0.036 or more the individual is classified as having CIN3 and/or cancer or as having a high risk of CIN3 and/or cancer development, and wherein the sensitivity of the assay is at least 82.00% and the specificity of the assay is at least 75.00%, preferably wherein the panel of one or more CpGs comprises at least nine CpG from DMR 394, and more preferably wherein the cancer index value is the mean β-value for the CpGs denoted by [[CG]] in SEQ ID NO: 5394;
[1775] 788. CpGs whose cancer index value is determined are located within at least DMR 394 defined by SEQ ID NO: 5394, and wherein when the cancer index for the individual is less than about 0.036 or more the individual is classified as not having cancer or as having a low risk of cancer development, and wherein the sensitivity of the assay is at least 82.00% and the specificity of the assay is at least 75.00%, preferably wherein the panel of one or more CpGs comprises at least nine CpG from DMR 394, and more preferably wherein the cancer index value is the mean β-value for the CpGs denoted by [[CG]] in SEQ ID NO: 5394;
[1776] 789. CpGs whose cancer index value is determined are located within at least DMR 395 defined by SEQ ID NO: 5395, and wherein when the cancer index for the individual is about 0.030 or more the individual is classified as having CIN3 and/or cancer or as having a high risk of CIN3 and/or cancer development, and wherein the sensitivity of the assay is at least 76.00% and the specificity of the assay is at least 75.00%, preferably wherein the panel of one or more CpGs comprises at least nine CpG from DMR 395, and more preferably wherein the cancer index value is the mean β-value for the CpGs denoted by [[CG]] in SEQ ID NO: 5395;
[1777] 790. CpGs whose cancer index value is determined are located within at least DMR 395 defined by SEQ ID NO: 5395, and wherein when the cancer index for the individual is less than about 0.030 or more the individual is classified as not having cancer or as having a low risk of cancer development, and wherein the sensitivity of the assay is at least 76.00% and the specificity of the assay is at least 75.00%, preferably wherein the panel of one or more CpGs comprises at least nine CpG from DMR 395, and more preferably wherein the cancer index value is the mean β-value for the CpGs denoted by [[CG]] in SEQ ID NO: 5395;
[1778] 791. CpGs whose cancer index value is determined are located within at least DMR 396 defined by SEQ ID NO: 5396, and wherein when the cancer index for the individual is about 0.042 or more the individual is classified as having CIN3 and/or cancer or as having a high risk of CIN3 and/or cancer development, and wherein the sensitivity of the assay is at least 79.00% and the specificity of the assay is at least 75.00%, preferably wherein the panel of one or more CpGs comprises at least nine CpG from DMR 396, and more preferably wherein the cancer index value is the mean β-value for the CpGs denoted by [[CG]] in SEQ ID NO: 5396;
[1779] 792. CpGs whose cancer index value is determined are located within at least DMR 396 defined by SEQ ID NO: 5396, and wherein when the cancer index for the individual is less than about 0.042 or more the individual is classified as not having cancer or as having a low risk of cancer development, and wherein the sensitivity of the assay is at least 79.00% and the specificity of the assay is at least 75.00%, preferably wherein the panel of one or more CpGs comprises at least nine CpG from DMR 396, and more preferably wherein the cancer index value is the mean β-value for the CpGs denoted by [[CG]] in SEQ ID NO: 5396;
[1780] 793. CpGs whose cancer index value is determined are located within at least DMR 397 defined by SEQ ID NO: 5397, and wherein when the cancer index for the individual is about 0.060 or more the individual is classified as having CIN3 and/or cancer or as having a high risk of CIN3 and/or cancer development, and wherein the sensitivity of the assay is at least 77.00% and the specificity of the assay is at least 75.00%, preferably wherein the panel of one or more CpGs comprises at least nine CpG from DMR 397, and more preferably wherein the cancer index value is the mean β-value for the CpGs denoted by [[CG]] in SEQ ID NO: 5397;
[1781] 794. CpGs whose cancer index value is determined are located within at least DMR 397 defined by SEQ ID NO: 5397, and wherein when the cancer index for the individual is less than about 0.060 or more the individual is classified as not having cancer or as having a low risk of cancer development, and wherein the sensitivity of the assay is at least 77.00% and the specificity of the assay is at least 75.00%, preferably wherein the panel of one or more CpGs comprises at least nine CpG from DMR 397, and more preferably wherein the cancer index value is the mean β-value for the CpGs denoted by [[CG]] in SEQ ID NO: 5397;
[1782] 795. CpGs whose cancer index value is determined are located within at least DMR 398 defined by SEQ ID NO: 5398, and wherein when the cancer index for the individual is about 0.042 or more the individual is classified as having CIN3 and/or cancer or as having a high risk of CIN3 and/or cancer development, and wherein the sensitivity of the assay is at least 71.00% and the specificity of the assay is at least 75.00%, preferably wherein the panel of one or more CpGs comprises at least nine CpG from DMR 398, and more preferably wherein the cancer index value is the mean β-value for the CpGs denoted by [[CG]] in SEQ ID NO: 5398;
[1783] 796. CpGs whose cancer index value is determined are located within at least DMR 398 defined by SEQ ID NO: 5398, and wherein when the cancer index for the individual is less than about 0.042 or more the individual is classified as not having cancer or as having a low risk of cancer development, and wherein the sensitivity of the assay is at least 71.00% and the specificity of the assay is at least 75.00%, preferably wherein the panel of one or more CpGs comprises at least nine CpG from DMR 398, and more preferably wherein the cancer index value is the mean β-value for the CpGs denoted by [[CG]] in SEQ ID NO: 5398;
[1784] 797. CpGs whose cancer index value is determined are located within at least DMR 399 defined by SEQ ID NO: 5399, and wherein when the cancer index for the individual is about 0.050 or more the individual is classified as having CIN3 and/or cancer or as having a high risk of CIN3 and/or cancer development, and wherein the sensitivity of the assay is at least 79.00% and the specificity of the assay is at least 75.00%, preferably wherein the panel of one or more CpGs comprises at least nine CpG from DMR 399, and more preferably wherein the cancer index value is the mean β-value for the CpGs denoted by [[CG]] in SEQ ID NO: 5399;
[1785] 798. CpGs whose cancer index value is determined are located within at least DMR 399 defined by SEQ ID NO: 5399, and wherein when the cancer index for the individual is less than about 0.042 or more the individual is classified as not having cancer or as having a low risk of cancer development, and wherein the sensitivity of the assay is at least 79.00% and the specificity of the assay is at least 75.00%, preferably wherein the panel of one or more CpGs comprises at least nine CpG from DMR 399, and more preferably wherein the cancer index value is the mean β-value for the CpGs denoted by [[CG]] in SEQ ID NO: 5399;
[1786] 799. CpGs whose cancer index value is determined are located within at least DMR 400 defined by SEQ ID NO: 5400, and wherein when the cancer index for the individual is about 0.032 or more the individual is classified as having CIN3 and/or cancer or as having a high risk of CIN3 and/or cancer development, and wherein the sensitivity of the assay is at least 77.00% and the specificity of the assay is at least 75.00%, preferably wherein the panel of one or more CpGs comprises at least nine CpG from DMR 400, and more preferably wherein the cancer index value is the mean β-value for the CpGs denoted by [[CG]] in SEQ ID NO: 5400;
[1787] 800. CpGs whose cancer index value is determined are located within at least DMR 400 defined by SEQ ID NO: 5400, and wherein when the cancer index for the individual is less than about 0.032 or more the individual is classified as not having cancer or as having a low risk of cancer development, and wherein the sensitivity of the assay is at least 77.00% and the specificity of the assay is at least 75.00%, preferably wherein the panel of one or more CpGs comprises at least nine CpG from DMR 400, and more preferably wherein the cancer index value is the mean β-value for the CpGs denoted by [[CG]] in SEQ ID NO: 5400;
[1788] 801. CpGs whose cancer index value is determined are located within at least DMR 401 defined by SEQ ID NO: 5401, and wherein when the cancer index for the individual is about 0.088 or more the individual is classified as having CIN3 and/or cancer or as having a high risk of CIN3 and/or cancer development, and wherein the sensitivity of the assay is at least 77.00% and the specificity of the assay is at least 75.00%, preferably wherein the panel of one or more CpGs comprises at least nine CpG from DMR 401, and more preferably wherein the cancer index value is the mean β-value for the CpGs denoted by [[CG]] in SEQ ID NO: 5401;
[1789] 802. CpGs whose cancer index value is determined are located within at least DMR 401 defined by SEQ ID NO: 5401, and wherein when the cancer index for the individual is less than about 0.088 or more the individual is classified as not having cancer or as having a low risk of cancer development, and wherein the sensitivity of the assay is at least 77.00% and the specificity of the assay is at least 75.00%, preferably wherein the panel of one or more CpGs comprises at least nine CpG from DMR 401, and more preferably wherein the cancer index value is the mean β-value for the CpGs denoted by [[CG]] in SEQ ID NO: 5401;
[1790] 803. CpGs whose cancer index value is determined are located within at least DMR 402 defined by SEQ ID NO: 5402, and wherein when the cancer index for the individual is about 0.084 or more the individual is classified as having CIN3 and/or cancer or as having a high risk of CIN3 and/or cancer development, and wherein the sensitivity of the assay is at least 76.00% and the specificity of the assay is at least 75.00%, preferably wherein the panel of one or more CpGs comprises at least nine CpG from DMR 402, and more preferably wherein the cancer index value is the mean β-value for the CpGs denoted by [[CG]] in SEQ ID NO: 5402;
[1791] 804. CpGs whose cancer index value is determined are located within at least DMR 402 defined by SEQ ID NO: 5402, and wherein when the cancer index for the individual is less than about 0.084 or more the individual is classified as not having cancer or as having a low risk of cancer development, and wherein the sensitivity of the assay is at least 76.00% and the specificity of the assay is at least 75.00%, preferably wherein the panel of one or more CpGs comprises at least nine CpG from DMR 402, and more preferably wherein the cancer index value is the mean β-value for the CpGs denoted by [[CG]] in SEQ ID NO: 5402;
[1792] 805. CpGs whose cancer index value is determined are located within at least DMR 403 defined by SEQ ID NO: 5403, and wherein when the cancer index for the individual is about 0.058 or more the individual is classified as having CIN3 and/or cancer or as having a high risk of CIN3 and/or cancer development, and wherein the sensitivity of the assay is at least 72.00% and the specificity of the assay is at least 75.00%, preferably wherein the panel of one or more CpGs comprises at least nine CpG from DMR 403, and more preferably wherein the cancer index value is the mean β-value for the CpGs denoted by [[CG]] in SEQ ID NO: 5403;
[1793] 806. CpGs whose cancer index value is determined are located within at least DMR 403 defined by SEQ ID NO: 5403, and wherein when the cancer index for the individual is less than about 0.058 or more the individual is classified as not having cancer or as having a low risk of cancer development, and wherein the sensitivity of the assay is at least 72.00% and the specificity of the assay is at least 75.00%, preferably wherein the panel of one or more CpGs comprises at least nine CpG from DMR 403, and more preferably wherein the cancer index value is the mean β-value for the CpGs denoted by [[CG]] in SEQ ID NO: 5403;
[1794] 807. CpGs whose cancer index value is determined are located within at least DMR 404 defined by SEQ ID NO: 5404, and wherein when the cancer index for the individual is about 0.023 or more the individual is classified as having CIN3 and/or cancer or as having a high risk of CIN3 and/or cancer development, and wherein the sensitivity of the assay is at least 74.00% and the specificity of the assay is at least 75.00%, preferably wherein the panel of one or more CpGs comprises at least nine CpG from DMR 404, and more preferably wherein the cancer index value is the mean β-value for the CpGs denoted by [[CG]] in SEQ ID NO: 5404;
[1795] 808. CpGs whose cancer index value is determined are located within at least DMR 404 defined by SEQ ID NO: 5404, and wherein when the cancer index for the individual is less than about 0.023 or more the individual is classified as not having cancer or as having a low risk of cancer development, and wherein the sensitivity of the assay is at least 74.00% and the specificity of the assay is at least 75.00%, preferably wherein the panel of one or more CpGs comprises at least nine CpG from DMR 404, and more preferably wherein the cancer index value is the mean β-value for the CpGs denoted by [[CG]] in SEQ ID NO: 5404;
[1796] 809. CpGs whose cancer index value is determined are located within at least DMR 405 defined by SEQ ID NO: 5405, and wherein when the cancer index for the individual is about 0.187 or more the individual is classified as having CIN3 and/or cancer or as having a high risk of CIN3 and/or cancer development, and wherein the sensitivity of the assay is at least 67.00% and the specificity of the assay is at least 75.00%, preferably wherein the panel of one or more CpGs comprises at least nine CpG from DMR 405, and more preferably wherein the cancer index value is the mean β-value for the CpGs denoted by [[CG]] in SEQ ID NO: 5405;
[1797] 810. CpGs whose cancer index value is determined are located within at least DMR 405 defined by SEQ ID NO: 5405, and wherein when the cancer index for the individual is less than about 0.187 or more the individual is classified as not having cancer or as having a low risk of cancer development, and wherein the sensitivity of the assay is at least 67.00% and the specificity of the assay is at least 75.00%, preferably wherein the panel of one or more CpGs comprises at least nine CpG from DMR 405, and more preferably wherein the cancer index value is the mean β-value for the CpGs denoted by [[CG]] in SEQ ID NO: 5405;
[1798] 811. CpGs whose cancer index value is determined are located within at least DMR 406 defined by SEQ ID NO: 5406, and wherein when the cancer index for the individual is about 0.091 or more the individual is classified as having CIN3 and/or cancer or as having a high risk of CIN3 and/or cancer development, and wherein the sensitivity of the assay is at least 69.00% and the specificity of the assay is at least 75.00%, preferably wherein the panel of one or more CpGs comprises at least nine CpG from DMR 406, and more preferably wherein the cancer index value is the mean β-value for the CpGs denoted by [[CG]] in SEQ ID NO: 5406;
[1799] 812. CpGs whose cancer index value is determined are located within at least DMR 406 defined by SEQ ID NO: 5406, and wherein when the cancer index for the individual is less than about 0.091 or more the individual is classified as not having cancer or as having a low risk of cancer development, and wherein the sensitivity of the assay is at least 69.00% and the specificity of the assay is at least 75.00%, preferably wherein the panel of one or more CpGs comprises at least nine CpG from DMR 406, and more preferably wherein the cancer index value is the mean β-value for the CpGs denoted by [[CG]] in SEQ ID NO: 5406;
[1800] 813. CpGs whose cancer index value is determined are located within at least DMR 407 defined by SEQ ID NO: 5407, and wherein when the cancer index for the individual is about 0.032 or more the individual is classified as having CIN3 and/or cancer or as having a high risk of CIN3 and/or cancer development, and wherein the sensitivity of the assay is at least 64.00% and the specificity of the assay is at least 75.00%, preferably wherein the panel of one or more CpGs comprises at least nine CpG from DMR 407, and more preferably wherein the cancer index value is the mean β-value for the CpGs denoted by [[CG]] in SEQ ID NO: 5407;
[1801] 814. CpGs whose cancer index value is determined are located within at least DMR 407 defined by SEQ ID NO: 5407, and wherein when the cancer index for the individual is less than about 0.032 or more the individual is classified as not having cancer or as having a low risk of cancer development, and wherein the sensitivity of the assay is at least 64.00% and the specificity of the assay is at least 75.00%, preferably wherein the panel of one or more CpGs comprises at least nine CpG from DMR 407, and more preferably wherein the cancer index value is the mean β-value for the CpGs denoted by [[CG]] in SEQ ID NO: 5407;
[1802] 815. CpGs whose cancer index value is determined are located within at least DMR 408 defined by SEQ ID NO: 5408, and wherein when the cancer index for the individual is about 0.054 or more the individual is classified as having CIN3 and/or cancer or as having a high risk of CIN3 and/or cancer development, and wherein the sensitivity of the assay is at least 70.00% and the specificity of the assay is at least 75.00%, preferably wherein the panel of one or more CpGs comprises at least nine CpG from DMR 408, and more preferably wherein the cancer index value is the mean β-value for the CpGs denoted by [[CG]] in SEQ ID NO: 5408;
[1803] 816. CpGs whose cancer index value is determined are located within at least DMR 408 defined by SEQ ID NO: 5408, and wherein when the cancer index for the individual is less than about 0.054 or more the individual is classified as not having cancer or as having a low risk of cancer development, and wherein the sensitivity of the assay is at least 70.00% and the specificity of the assay is at least 75.00%, preferably wherein the panel of one or more CpGs comprises at least nine CpG from DMR 408, and more preferably wherein the cancer index value is the mean β-value for the CpGs denoted by [[CG]] in SEQ ID NO: 5408;
[1804] 817. CpGs whose cancer index value is determined are located within at least DMR 409 defined by SEQ ID NO: 5409, and wherein when the cancer index for the individual is about 0.034 or more the individual is classified as having CIN3 and/or cancer or as having a high risk of CIN3 and/or cancer development, and wherein the sensitivity of the assay is at least 67.00% and the specificity of the assay is at least 75.00%, preferably wherein the panel of one or more CpGs comprises at least nine CpG from DMR 409, and more preferably wherein the cancer index value is the mean β-value for the CpGs denoted by [[CG]] in SEQ ID NO: 5409;
[1805] 818. CpGs whose cancer index value is determined are located within at least DMR 409 defined by SEQ ID NO: 5409, and wherein when the cancer index for the individual is less than about 0.034 or more the individual is classified as not having cancer or as having a low risk of cancer development, and wherein the sensitivity of the assay is at least 67.00% and the specificity of the assay is at least 75.00%, preferably wherein the panel of one or more CpGs comprises at least nine CpG from DMR 409, and more preferably wherein the cancer index value is the mean β-value for the CpGs denoted by [[CG]] in SEQ ID NO: 5409;
[1806] 819. CpGs whose cancer index value is determined are located within at least DMR 410 defined by SEQ ID NO: 5410, and wherein when the cancer index for the individual is about 0.062 or more the individual is classified as having CIN3 and/or cancer or as having a high risk of CIN3 and/or cancer development, and wherein the sensitivity of the assay is at least 64.00% and the specificity of the assay is at least 75.00%, preferably wherein the panel of one or more CpGs comprises at least nine CpG from DMR 410, and more preferably wherein the cancer index value is the mean β-value for the CpGs denoted by [[CG]] in SEQ ID NO: 5410;
[1807] 820. CpGs whose cancer index value is determined are located within at least DMR 410 defined by SEQ ID NO: 5410, and wherein when the cancer index for the individual is less than about 0.062 or more the individual is classified as not having cancer or as having a low risk of cancer development, and wherein the sensitivity of the assay is at least 64.00% and the specificity of the assay is at least 75.00%, preferably wherein the panel of one or more CpGs comprises at least nine CpG from DMR 410, and more preferably wherein the cancer index value is the mean β-value for the CpGs denoted by [[CG]] in SEQ ID NO: 5410;
[1808] 821. CpGs whose cancer index value is determined are located within at least DMR 411 defined by SEQ ID NO: 5411, and wherein when the cancer index for the individual is about 0.082 or more the individual is classified as having CIN3 and/or cancer or as having a high risk of CIN3 and/or cancer development, and wherein the sensitivity of the assay is at least 67.00% and the specificity of the assay is at least 75.00%, preferably wherein the panel of one or more CpGs comprises at least nine CpG from DMR 411, and more preferably wherein the cancer index value is the mean β-value for the CpGs denoted by [[CG]] in SEQ ID NO: 5411;
[1809] 822. CpGs whose cancer index value is determined are located within at least DMR 411 defined by SEQ ID NO: 5408, and wherein when the cancer index for the individual is less than about 0.082 or more the individual is classified as not having cancer or as having a low risk of cancer development, and wherein the sensitivity of the assay is at least 67.00% and the specificity of the assay is at least 75.00%, preferably wherein the panel of one or more CpGs comprises at least nine CpG from DMR 411, and more preferably wherein the cancer index value is the mean β-value for the CpGs denoted by [[CG]] in SEQ ID NO: 5411;
[1810] 823. CpGs whose cancer index value is determined are located within at least DMR 412 defined by SEQ ID NO: 5412, and wherein when the cancer index for the individual is about 0.062 or more the individual is classified as having CIN3 and/or cancer or as having a high risk of CIN3 and/or cancer development, and wherein the sensitivity of the assay is at least 71.00% and the specificity of the assay is at least 75.00%, preferably wherein the panel of one or more CpGs comprises at least nine CpG from DMR 412, and more preferably wherein the cancer index value is the mean β-value for the CpGs denoted by [[CG]] in SEQ ID NO: 5412;
[1811] 824. CpGs whose cancer index value is determined are located within at least DMR 412 defined by SEQ ID NO: 5412, and wherein when the cancer index for the individual is less than about 0.062 or more the individual is classified as not having cancer or as having a low risk of cancer development, and wherein the sensitivity of the assay is at least 71.00% and the specificity of the assay is at least 75.00%, preferably wherein the panel of one or more CpGs comprises at least nine CpG from DMR 412, and more preferably wherein the cancer index value is the mean β-value for the CpGs denoted by [[CG]] in SEQ ID NO: 5412;
[1812] 825. CpGs whose cancer index value is determined are located within at least DMR 413 defined by SEQ ID NO: 5413, and wherein when the cancer index for the individual is about 0.072 or more the individual is classified as having CIN3 and/or cancer or as having a high risk of CIN3 and/or cancer development, and wherein the sensitivity of the assay is at least 63.00% and the specificity of the assay is at least 75.00%, preferably wherein the panel of one or more CpGs comprises at least nine CpG from DMR 413, and more preferably wherein the cancer index value is the mean β-value for the CpGs denoted by [[CG]] in SEQ ID NO: 5413;
[1813] 826. CpGs whose cancer index value is determined are located within at least DMR 413 defined by SEQ ID NO: 5413, and wherein when the cancer index for the individual is less than about 0.072 or more the individual is classified as not having cancer or as having a low risk of cancer development, and wherein the sensitivity of the assay is at least 63.00% and the specificity of the assay is at least 75.00%, preferably wherein the panel of one or more CpGs comprises at least nine CpG from DMR 413, and more preferably wherein the cancer index value is the mean β-value for the CpGs denoted by [[CG]] in SEQ ID NO: 5413;
[1814] 827. CpGs whose cancer index value is determined are located within at least DMR 414 defined by SEQ ID NO: 5414, and wherein when the cancer index for the individual is about 0.043 or more the individual is classified as having CIN3 and/or cancer or as having a high risk of CIN3 and/or cancer development, and wherein the sensitivity of the assay is at least 66.00% and the specificity of the assay is at least 75.00%, preferably wherein the panel of one or more CpGs comprises at least nine CpG from DMR 414, and more preferably wherein the cancer index value is the mean β-value for the CpGs denoted by [[CG]] in SEQ ID NO: 5414;
[1815] 828. CpGs whose cancer index value is determined are located within at least DMR 414 defined by SEQ ID NO: 5414, and wherein when the cancer index for the individual is less than about 0.043 or more the individual is classified as not having cancer or as having a low risk of cancer development, and wherein the sensitivity of the assay is at least 66.00% and the specificity of the assay is at least 75.00%, preferably wherein the panel of one or more CpGs comprises at least nine CpG from DMR 414, and more preferably wherein the cancer index value is the mean β-value for the CpGs denoted by [[CG]] in SEQ ID NO: 5414;
[1816] 829. CpGs whose cancer index value is determined are located within at least DMR 415 defined by SEQ ID NO: 5415, and wherein when the cancer index for the individual is about 0.203 or more the individual is classified as having CIN3 and/or cancer or as having a high risk of CIN3 and/or cancer development, and wherein the sensitivity of the assay is at least 66.00% and the specificity of the assay is at least 75.00%, preferably wherein the panel of one or more CpGs comprises at least nine CpG from DMR 415, and more preferably wherein the cancer index value is the mean β-value for the CpGs denoted by [[CG]] in SEQ ID NO: 5415;
[1817] 830. CpGs whose cancer index value is determined are located within at least DMR 415 defined by SEQ ID NO: 5415, and wherein when the cancer index for the individual is less than about 0.203 or more the individual is classified as not having cancer or as having a low risk of cancer development, and wherein the sensitivity of the assay is at least 66.00% and the specificity of the assay is at least 75.00%, preferably wherein the panel of one or more CpGs comprises at least nine CpG from DMR 415, and more preferably wherein the cancer index value is the mean β-value for the CpGs denoted by [[CG]] in SEQ ID NO: 5415;
[1818] 831. CpGs whose cancer index value is determined are located within at least DMR 416 defined by SEQ ID NO: 5416, and wherein when the cancer index for the individual is about 0.098 or more the individual is classified as having CIN3 and/or cancer or as having a high risk of CIN3 and/or cancer development, and wherein the sensitivity of the assay is at least 64.00% and the specificity of the assay is at least 75.00%, preferably wherein the panel of one or more CpGs comprises at least nine CpG from DMR 416, and more preferably wherein the cancer index value is the mean β-value for the CpGs denoted by [[CG]] in SEQ ID NO: 5416;
[1819] 832. CpGs whose cancer index value is determined are located within at least DMR 416 defined by SEQ ID NO: 5416, and wherein when the cancer index for the individual is less than about 0.098 or more the individual is classified as not having cancer or as having a low risk of cancer development, and wherein the sensitivity of the assay is at least 64.00% and the specificity of the assay is at least 75.00%, preferably wherein the panel of one or more CpGs comprises at least nine CpG from DMR 416, and more preferably wherein the cancer index value is the mean β-value for the CpGs denoted by [[CG]] in SEQ ID NO: 5416;
[1820] 833. CpGs whose cancer index value is determined are located within at least DMR 417 defined by SEQ ID NO: 5417, and wherein when the cancer index for the individual is about 0.057 or more the individual is classified as having CIN3 and/or cancer or as having a high risk of CIN3 and/or cancer development, and wherein the sensitivity of the assay is at least 64.00% and the specificity of the assay is at least 75.00%, preferably wherein the panel of one or more CpGs comprises at least nine CpG from DMR 417, and more preferably wherein the cancer index value is the mean β-value for the CpGs denoted by [[CG]] in SEQ ID NO: 5417;
[1821] 834. CpGs whose cancer index value is determined are located within at least DMR 417 defined by SEQ ID NO: 5417, and wherein when the cancer index for the individual is less than about 0.057 or more the individual is classified as not having cancer or as having a low risk of cancer development, and wherein the sensitivity of the assay is at least 64.00% and the specificity of the assay is at least 75.00%, preferably wherein the panel of one or more CpGs comprises at least nine CpG from DMR 417, and more preferably wherein the cancer index value is the mean β-value for the CpGs denoted by [[CG]] in SEQ ID NO: 5417;
[1822] 835. CpGs whose cancer index value is determined are located within at least DMR 418 defined by SEQ ID NO: 5418, and wherein when the cancer index for the individual is about 0.111 or more the individual is classified as having CIN3 and/or cancer or as having a high risk of CIN3 and/or cancer development, and wherein the sensitivity of the assay is at least 62.00% and the specificity of the assay is at least 75.00%, preferably wherein the panel of one or more CpGs comprises at least nine CpG from DMR 418, and more preferably wherein the cancer index value is the mean β-value for the CpGs denoted by [[CG]] in SEQ ID NO: 5418;
[1823] 836. CpGs whose cancer index value is determined are located within at least DMR 418 defined by SEQ ID NO: 5418, and wherein when the cancer index for the individual is less than about 0.111 or more the individual is classified as not having cancer or as having a low risk of cancer development, and wherein the sensitivity of the assay is at least 62.00% and the specificity of the assay is at least 75.00%, preferably wherein the panel of one or more CpGs comprises at least nine CpG from DMR 418, and more preferably wherein the cancer index value is the mean β-value for the CpGs denoted by [[CG]] in SEQ ID NO: 5418.

[1824] In any of the described assays, the methylation status of the one or more CpGs in the panel is preferably determined by a β-value analysis, and the assay is for assessing the presence, absence or development of CIN3 and/or cancer, preferably the cancer is cervical cancer or endometrial cancer. Most preferably, the cancer is cervical cancer.

[1825] The ROC data set out in Table 7 corresponding to each of SEQ ID NOs: 5001 to 5418 are derived by determining a cancer index value from a panel of CpGs in each instance whereby the panel comprises the CpGs denoted by [[CG]].

TABLE 7

| seq_ID | chr | start | stop | mean_CIN3+_cases | mean_controls | cutoff | specificity | sensitivity | auc |
|---|---|---|---|---|---|---|---|---|---|
| 5001 | chr15 | 26108091 | 26108691 | 0.078 | 0.022 | 0.023 | 0.75 | 0.85 | 0.894 |
| 5002 | chr15 | 26108101 | 26108701 | 0.078 | 0.022 | 0.023 | 0.75 | 0.85 | 0.894 |
| 5003 | chr15 | 26108110 | 26108710 | 0.078 | 0.022 | 0.023 | 0.75 | 0.85 | 0.894 |
| 5004 | chr15 | 26108099 | 26108699 | 0.078 | 0.022 | 0.023 | 0.75 | 0.85 | 0.894 |
| 5005 | chr15 | 26108112 | 26108712 | 0.078 | 0.022 | 0.023 | 0.75 | 0.85 | 0.894 |
| 5006 | chr19 | 38182755 | 38183355 | 0.08 | 0.026 | 0.027 | 0.75 | 0.83 | 0.876 |
| 5007 | chr1 | 76539922 | 76540522 | 0.079 | 0.026 | 0.027 | 0.75 | 0.8 | 0.874 |
| 5008 | chr1 | 76539934 | 76540534 | 0.079 | 0.026 | 0.027 | 0.75 | 0.8 | 0.874 |
| 5009 | chr1 | 76539929 | 76540529 | 0.079 | 0.026 | 0.027 | 0.75 | 0.8 | 0.874 |
| 5010 | chr1 | 76539936 | 76540536 | 0.079 | 0.026 | 0.027 | 0.75 | 0.8 | 0.874 |
| 5011 | chr1 | 76539926 | 76540526 | 0.079 | 0.026 | 0.027 | 0.75 | 0.8 | 0.874 |
| 5012 | chr1 | 76539868 | 76540468 | 0.079 | 0.026 | 0.027 | 0.75 | 0.8 | 0.874 |
| 5013 | chr1 | 76539848 | 76540448 | 0.079 | 0.026 | 0.027 | 0.75 | 0.8 | 0.874 |
| 5014 | chr18 | 5629383 | 5629983 | 0.083 | 0.019 | 0.02 | 0.75 | 0.8 | 0.87 |
| 5015 | chr8 | 72755758 | 72756358 | 0.089 | 0.025 | 0.026 | 0.75 | 0.83 | 0.869 |
| 5016 | chr8 | 72755855 | 72756455 | 0.089 | 0.025 | 0.026 | 0.75 | 0.83 | 0.869 |
| 5017 | chr8 | 72755853 | 72756453 | 0.089 | 0.025 | 0.026 | 0.75 | 0.83 | 0.869 |
| 5018 | chr15 | 26108312 | 26108912 | 0.068 | 0.023 | 0.025 | 0.75 | 0.78 | 0.868 |
| 5019 | chr15 | 26108342 | 26108942 | 0.068 | 0.023 | 0.025 | 0.75 | 0.78 | 0.868 |
| 5020 | chr1 | 76540138 | 76540738 | 0.081 | 0.027 | 0.028 | 0.75 | 0.8 | 0.866 |
| 5021 | chr18 | 5543501 | 5544101 | 0.088 | 0.029 | 0.03 | 0.75 | 0.8 | 0.863 |
| 5022 | chr18 | 5629590 | 5630190 | 0.079 | 0.018 | 0.019 | 0.75 | 0.82 | 0.863 |
| 5023 | chr8 | 72755571 | 72756171 | 0.077 | 0.027 | 0.029 | 0.75 | 0.82 | 0.862 |
| 5024 | chr1 | 2.14E+08 | 2.14E+08 | 0.082 | 0.035 | 0.039 | 0.75 | 0.78 | 0.861 |
| 5025 | chr1 | 75601867 | 75602467 | 0.126 | 0.046 | 0.048 | 0.75 | 0.8 | 0.86 |
| 5026 | chr1 | 75602151 | 75602751 | 0.126 | 0.046 | 0.048 | 0.75 | 0.8 | 0.86 |
| 5027 | chr8 | 72756007 | 72756607 | 0.088 | 0.022 | 0.022 | 0.75 | 0.79 | 0.86 |
| 5028 | chr1 | 75602112 | 75602712 | 0.126 | 0.046 | 0.048 | 0.75 | 0.8 | 0.86 |
| 5029 | chr8 | 72756041 | 72756641 | 0.088 | 0.022 | 0.022 | 0.75 | 0.79 | 0.86 |
| 5030 | chr12 | 1.29E+08 | 1.29E+08 | 0.092 | 0.031 | 0.034 | 0.75 | 0.76 | 0.859 |
| 5031 | chr19 | 38182830 | 38183430 | 0.078 | 0.028 | 0.03 | 0.75 | 0.79 | 0.859 |
| 5032 | chr7 | 1.54E+08 | 1.54E+08 | 0.114 | 0.029 | 0.027 | 0.75 | 0.83 | 0.858 |
| 5033 | chr7 | 1.54E+08 | 1.54E+08 | 0.114 | 0.029 | 0.027 | 0.75 | 0.83 | 0.858 |
| 5034 | chr19 | 56904601 | 56905201 | 0.105 | 0.038 | 0.041 | 0.75 | 0.74 | 0.858 |
| 5035 | chr19 | 56904665 | 56905265 | 0.105 | 0.038 | 0.041 | 0.75 | 0.74 | 0.858 |
| 5036 | chr19 | 38182953 | 38183553 | 0.075 | 0.025 | 0.026 | 0.75 | 0.8 | 0.858 |
| 5037 | chr19 | 38182955 | 38183555 | 0.075 | 0.025 | 0.026 | 0.75 | 0.8 | 0.858 |
| 5038 | chr19 | 38182962 | 38183562 | 0.075 | 0.025 | 0.026 | 0.75 | 0.8 | 0.858 |
| 5039 | chr19 | 56904645 | 56905245 | 0.105 | 0.038 | 0.041 | 0.75 | 0.74 | 0.858 |
| 5040 | chr19 | 56904677 | 56905277 | 0.105 | 0.038 | 0.041 | 0.75 | 0.74 | 0.858 |
| 5041 | chr19 | 38182959 | 38183559 | 0.075 | 0.025 | 0.026 | 0.75 | 0.8 | 0.858 |
| 5042 | chr19 | 56904713 | 56905313 | 0.105 | 0.038 | 0.041 | 0.75 | 0.74 | 0.858 |
| 5043 | chr19 | 56904697 | 56905297 | 0.105 | 0.038 | 0.041 | 0.75 | 0.74 | 0.858 |
| 5044 | chr19 | 56904732 | 56905332 | 0.105 | 0.038 | 0.041 | 0.75 | 0.74 | 0.858 |
| 5045 | chr19 | 56904455 | 56905055 | 0.109 | 0.039 | 0.041 | 0.75 | 0.76 | 0.858 |
| 5046 | chr12 | 1.29E+08 | 1.29E+08 | 0.09 | 0.034 | 0.038 | 0.75 | 0.74 | 0.858 |
| 5047 | chr19 | 38182910 | 38183510 | 0.075 | 0.027 | 0.029 | 0.75 | 0.77 | 0.856 |
| 5048 | chr7 | 1.54E+08 | 1.54E+08 | 0.111 | 0.029 | 0.028 | 0.75 | 0.83 | 0.855 |
| 5049 | chr7 | 1.54E+08 | 1.54E+08 | 0.111 | 0.029 | 0.028 | 0.75 | 0.83 | 0.855 |
| 5050 | chr7 | 1.54E+08 | 1.54E+08 | 0.111 | 0.029 | 0.028 | 0.75 | 0.83 | 0.855 |
| 5051 | chr12 | 1.03E+08 | 1.03E+08 | 0.076 | 0.032 | 0.034 | 0.75 | 0.76 | 0.852 |
| 5052 | chr12 | 1.03E+08 | 1.03E+08 | 0.076 | 0.032 | 0.034 | 0.75 | 0.76 | 0.852 |
| 5053 | chr11 | 1.32E+08 | 1.32E+08 | 0.133 | 0.035 | 0.036 | 0.75 | 0.82 | 0.851 |
| 5054 | chr11 | 1.32E+08 | 1.32E+08 | 0.133 | 0.035 | 0.036 | 0.75 | 0.82 | 0.851 |
| 5055 | chr1 | 2.14E+08 | 2.14E+08 | 0.104 | 0.045 | 0.05 | 0.75 | 0.76 | 0.851 |
| 5056 | chr18 | 5629716 | 5630316 | 0.078 | 0.016 | 0.016 | 0.75 | 0.77 | 0.851 |
| 5057 | chr11 | 1.32E+08 | 1.32E+08 | 0.133 | 0.035 | 0.036 | 0.75 | 0.82 | 0.851 |
| 5058 | chr19 | 57617836 | 57618436 | 0.184 | 0.073 | 0.085 | 0.75 | 0.77 | 0.848 |
| 5059 | chr18 | 5543248 | 5543848 | 0.102 | 0.028 | 0.028 | 0.75 | 0.8 | 0.847 |
| 5060 | chr10 | 1.11E+08 | 1.11E+08 | 0.116 | 0.041 | 0.042 | 0.75 | 0.8 | 0.847 |
| 5061 | chr12 | 1.03E+08 | 1.03E+08 | 0.088 | 0.034 | 0.037 | 0.75 | 0.77 | 0.846 |
| 5062 | chr2 | 5836757 | 5837357 | 0.117 | 0.053 | 0.057 | 0.75 | 0.77 | 0.846 |
| 5063 | chr18 | 5543645 | 5544245 | 0.077 | 0.031 | 0.031 | 0.75 | 0.77 | 0.845 |
| 5064 | chr18 | 5543731 | 5544331 | 0.077 | 0.031 | 0.031 | 0.75 | 0.77 | 0.845 |
| 5065 | chr18 | 5543799 | 5544399 | 0.077 | 0.031 | 0.031 | 0.75 | 0.77 | 0.845 |
| 5066 | chr18 | 5543789 | 5544389 | 0.077 | 0.031 | 0.031 | 0.75 | 0.77 | 0.845 |
| 5067 | chr12 | 1.03E+08 | 1.03E+08 | 0.089 | 0.038 | 0.041 | 0.75 | 0.77 | 0.843 |
| 5068 | chr14 | 48143659 | 48144259 | 0.097 | 0.035 | 0.037 | 0.75 | 0.79 | 0.843 |
| 5069 | chr18 | 70534234 | 70534834 | 0.126 | 0.047 | 0.05 | 0.75 | 0.82 | 0.84 |
| 5070 | chr2 | 5837048 | 5837648 | 0.101 | 0.045 | 0.049 | 0.75 | 0.77 | 0.84 |
| 5071 | chr6 | 1.23E+08 | 1.23E+08 | 0.101 | 0.038 | 0.041 | 0.75 | 0.7 | 0.84 |
| 5072 | chr18 | 70533998 | 70534598 | 0.129 | 0.053 | 0.06 | 0.75 | 0.77 | 0.839 |
| 5073 | chr14 | 38724375 | 38724975 | 0.124 | 0.038 | 0.042 | 0.75 | 0.79 | 0.839 |
| 5074 | chr14 | 38724348 | 38724948 | 0.124 | 0.038 | 0.042 | 0.75 | 0.79 | 0.839 |
| 5075 | chr14 | 38724346 | 38724946 | 0.124 | 0.038 | 0.042 | 0.75 | 0.79 | 0.839 |
| 5076 | chr14 | 38724645 | 38725245 | 0.124 | 0.038 | 0.042 | 0.75 | 0.79 | 0.839 |
| 5077 | chr4 | 21950007 | 21950607 | 0.093 | 0.037 | 0.038 | 0.75 | 0.77 | 0.839 |
| 5078 | chr2 | 5836413 | 5837013 | 0.114 | 0.022 | 0.016 | 0.75 | 0.77 | 0.838 |
| 5079 | chr18 | 5543578 | 5544178 | 0.084 | 0.032 | 0.033 | 0.75 | 0.77 | 0.838 |
| 5080 | chr18 | 5543869 | 5544469 | 0.074 | 0.031 | 0.032 | 0.75 | 0.77 | 0.838 |
| 5081 | chr10 | 1.11E+08 | 1.11E+08 | 0.081 | 0.035 | 0.037 | 0.75 | 0.75 | 0.838 |
| 5082 | chr11 | 20690640 | 20691240 | 0.104 | 0.032 | 0.033 | 0.75 | 0.75 | 0.837 |
| 5083 | chr6 | 1.23E+08 | 1.23E+08 | 0.093 | 0.038 | 0.042 | 0.75 | 0.71 | 0.837 |
| 5084 | chr11 | 20690630 | 20691230 | 0.104 | 0.032 | 0.033 | 0.75 | 0.75 | 0.837 |
| 5085 | chr11 | 20690657 | 20691257 | 0.104 | 0.032 | 0.033 | 0.75 | 0.75 | 0.837 |
| 5086 | chr11 | 20690634 | 20691234 | 0.104 | 0.032 | 0.033 | 0.75 | 0.75 | 0.837 |
| 5087 | chr5 | 1.14E+08 | 1.14E+08 | 0.112 | 0.052 | 0.058 | 0.75 | 0.78 | 0.837 |
| 5088 | chr20 | 21686248 | 21686848 | 0.082 | 0.038 | 0.042 | 0.75 | 0.74 | 0.837 |
| 5089 | chr10 | 1.11E+08 | 1.11E+08 | 0.075 | 0.033 | 0.036 | 0.75 | 0.77 | 0.836 |
| 5090 | chr6 | 1.23E+08 | 1.23E+08 | 0.092 | 0.037 | 0.04 | 0.75 | 0.7 | 0.836 |
| 5091 | chr6 | 1.23E+08 | 1.23E+08 | 0.092 | 0.037 | 0.04 | 0.75 | 0.7 | 0.836 |
| 5092 | chr6 | 1.23E+08 | 1.23E+08 | 0.098 | 0.039 | 0.042 | 0.75 | 0.7 | 0.836 |
| 5093 | chr4 | 21950267 | 21950867 | 0.111 | 0.046 | 0.05 | 0.75 | 0.79 | 0.835 |
| 5094 | chr4 | 21950284 | 21950884 | 0.111 | 0.046 | 0.05 | 0.75 | 0.79 | 0.835 |
| 5095 | chr19 | 30865902 | 30866502 | 0.116 | 0.032 | 0.032 | 0.75 | 0.77 | 0.834 |
| 5096 | chr19 | 30865894 | 30866494 | 0.116 | 0.032 | 0.032 | 0.75 | 0.77 | 0.834 |
| 5097 | chr7 | 70597413 | 70598013 | 0.111 | 0.051 | 0.053 | 0.75 | 0.77 | 0.834 |
| 5098 | chr11 | 1.33E+08 | 1.33E+08 | 0.067 | 0.023 | 0.024 | 0.75 | 0.75 | 0.834 |
| 5099 | chr19 | 30866065 | 30866665 | 0.116 | 0.032 | 0.032 | 0.75 | 0.77 | 0.834 |
| 5100 | chr11 | 20690382 | 20690982 | 0.102 | 0.033 | 0.036 | 0.75 | 0.72 | 0.834 |
| 5101 | chr11 | 20690880 | 20691480 | 0.104 | 0.034 | 0.034 | 0.75 | 0.76 | 0.834 |
| 5102 | chr19 | 30865892 | 30866492 | 0.116 | 0.032 | 0.032 | 0.75 | 0.77 | 0.834 |
| 5103 | chr11 | 20690861 | 20691461 | 0.104 | 0.034 | 0.034 | 0.75 | 0.76 | 0.834 |
| 5104 | chr11 | 1.33E+08 | 1.33E+08 | 0.067 | 0.023 | 0.024 | 0.75 | 0.75 | 0.834 |
| 5105 | chr11 | 1.33E+08 | 1.33E+08 | 0.067 | 0.023 | 0.024 | 0.75 | 0.75 | 0.834 |
| 5106 | chr11 | 20690507 | 20691107 | 0.102 | 0.033 | 0.036 | 0.75 | 0.72 | 0.834 |
| 5107 | chr11 | 20690420 | 20691020 | 0.102 | 0.033 | 0.036 | 0.75 | 0.72 | 0.834 |
| 5108 | chr10 | 1.11E+08 | 1.11E+08 | 0.111 | 0.048 | 0.051 | 0.75 | 0.77 | 0.833 |
| 5109 | chr19 | 58010840 | 58011440 | 0.107 | 0.037 | 0.04 | 0.75 | 0.76 | 0.833 |
| 5110 | chr19 | 58010967 | 58011567 | 0.107 | 0.037 | 0.04 | 0.75 | 0.76 | 0.833 |
| 5111 | chr7 | 70597478 | 70598078 | 0.117 | 0.054 | 0.057 | 0.75 | 0.77 | 0.833 |
| 5112 | chr19 | 58011009 | 58011609 | 0.107 | 0.037 | 0.04 | 0.75 | 0.76 | 0.833 |
| 5113 | chr7 | 70597474 | 70598074 | 0.117 | 0.054 | 0.057 | 0.75 | 0.77 | 0.833 |
| 5114 | chr19 | 58011045 | 58011645 | 0.107 | 0.037 | 0.04 | 0.75 | 0.76 | 0.833 |
| 5115 | chr11 | 20690826 | 20691426 | 0.112 | 0.036 | 0.037 | 0.75 | 0.76 | 0.833 |
| 5116 | chr12 | 1.29E+08 | 1.29E+08 | 0.136 | 0.043 | 0.047 | 0.75 | 0.76 | 0.831 |
| 5117 | chr16 | 62069705 | 62070305 | 0.078 | 0.033 | 0.035 | 0.75 | 0.78 | 0.831 |
| 5118 | chr20 | 21685973 | 21686573 | 0.083 | 0.038 | 0.043 | 0.75 | 0.74 | 0.83 |
| 5119 | chr20 | 21685993 | 21686593 | 0.083 | 0.038 | 0.043 | 0.75 | 0.74 | 0.83 |
| 5120 | chr20 | 21685982 | 21686582 | 0.083 | 0.038 | 0.043 | 0.75 | 0.74 | 0.83 |
| 5121 | chr20 | 21685964 | 21686564 | 0.083 | 0.038 | 0.043 | 0.75 | 0.74 | 0.83 |
| 5122 | chr5 | 11384765 | 11385365 | 0.06 | 0.021 | 0.022 | 0.75 | 0.75 | 0.83 |
| 5123 | chr20 | 21685951 | 21686551 | 0.083 | 0.038 | 0.043 | 0.75 | 0.74 | 0.83 |
| 5124 | chr20 | 21686076 | 21686676 | 0.083 | 0.038 | 0.043 | 0.75 | 0.74 | 0.83 |
| 5125 | chr20 | 21686008 | 21686608 | 0.083 | 0.038 | 0.043 | 0.75 | 0.74 | 0.83 |
| 5126 | chr5 | 11384767 | 11385367 | 0.06 | 0.021 | 0.022 | 0.75 | 0.75 | 0.83 |
| 5127 | chr20 | 21685953 | 21686553 | 0.083 | 0.038 | 0.043 | 0.75 | 0.74 | 0.83 |
| 5128 | chr7 | 35293569 | 35294169 | 0.097 | 0.037 | 0.038 | 0.75 | 0.7 | 0.829 |
| 5129 | chr7 | 35293592 | 35294192 | 0.097 | 0.037 | 0.038 | 0.75 | 0.7 | 0.829 |
| 5130 | chr16 | 62069506 | 62070106 | 0.076 | 0.027 | 0.029 | 0.75 | 0.72 | 0.829 |
| 5131 | chr7 | 35293584 | 35294184 | 0.097 | 0.037 | 0.038 | 0.75 | 0.7 | 0.829 |
| 5132 | chr12 | 1.15E+08 | 1.15E+08 | 0.068 | 0.028 | 0.03 | 0.75 | 0.77 | 0.828 |
| 5133 | chr1 | 2.37E+08 | 2.37E+08 | 0.085 | 0.033 | 0.036 | 0.75 | 0.72 | 0.828 |
| 5134 | chr5 | 1.14E+08 | 1.14E+08 | 0.096 | 0.047 | 0.051 | 0.75 | 0.78 | 0.828 |
| 5135 | chr2 | 47797663 | 47798263 | 0.082 | 0.024 | 0.025 | 0.75 | 0.76 | 0.828 |
| 5136 | chr1 | 2.37E+08 | 2.37E+08 | 0.085 | 0.033 | 0.036 | 0.75 | 0.72 | 0.828 |
| 5137 | chr13 | 1.13E+08 | 1.13E+08 | 0.169 | 0.082 | 0.088 | 0.75 | 0.77 | 0.827 |
| 5138 | chr13 | 1.13E+08 | 1.13E+08 | 0.169 | 0.082 | 0.088 | 0.75 | 0.77 | 0.827 |
| 5139 | chr13 | 1.09E+08 | 1.09E+08 | 0.082 | 0.037 | 0.04 | 0.75 | 0.76 | 0.827 |
| 5140 | chr1 | 50513466 | 50514066 | 0.161 | 0.091 | 0.099 | 0.75 | 0.74 | 0.826 |
| 5141 | chr13 | 1.09E+08 | 1.09E+08 | 0.088 | 0.04 | 0.044 | 0.75 | 0.74 | 0.826 |
| 5142 | chr13 | 1.13E+08 | 1.13E+08 | 0.067 | 0.026 | 0.029 | 0.75 | 0.7 | 0.826 |
| 5143 | chr4 | 21950422 | 21951022 | 0.128 | 0.062 | 0.07 | 0.75 | 0.74 | 0.826 |
| 5144 | chr18 | 5629772 | 5630372 | 0.075 | 0.019 | 0.02 | 0.75 | 0.71 | 0.826 |
| 5145 | chr13 | 1.13E+08 | 1.13E+08 | 0.067 | 0.026 | 0.029 | 0.75 | 0.7 | 0.826 |
| 5146 | chr18 | 70533810 | 70534410 | 0.138 | 0.058 | 0.065 | 0.75 | 0.77 | 0.826 |
| 5147 | chr16 | 6069101 | 6069701 | 0.154 | 0.077 | 0.084 | 0.75 | 0.76 | 0.825 |
| 5148 | chr16 | 6069111 | 6069711 | 0.154 | 0.077 | 0.084 | 0.75 | 0.76 | 0.825 |
| 5149 | chr16 | 6069099 | 6069699 | 0.154 | 0.077 | 0.084 | 0.75 | 0.76 | 0.825 |
| 5150 | chr14 | 48143897 | 48144497 | 0.108 | 0.053 | 0.058 | 0.75 | 0.72 | 0.825 |
| 5151 | chr14 | 48143886 | 48144486 | 0.108 | 0.053 | 0.058 | 0.75 | 0.72 | 0.825 |
| 5152 | chr10 | 44880408 | 44881008 | 0.082 | 0.025 | 0.027 | 0.75 | 0.74 | 0.825 |
| 5153 | chr10 | 44880430 | 44881030 | 0.082 | 0.025 | 0.027 | 0.75 | 0.74 | 0.825 |
| 5154 | chr16 | 62069919 | 62070519 | 0.081 | 0.039 | 0.042 | 0.75 | 0.71 | 0.825 |
| 5155 | chr16 | 62069946 | 62070546 | 0.081 | 0.039 | 0.042 | 0.75 | 0.71 | 0.825 |
| 5156 | chr12 | 1.15E+08 | 1.15E+08 | 0.067 | 0.032 | 0.034 | 0.75 | 0.74 | 0.825 |
| 5157 | chr16 | 62069884 | 62070484 | 0.081 | 0.039 | 0.042 | 0.75 | 0.71 | 0.825 |
| 5158 | chr16 | 62069864 | 62070464 | 0.081 | 0.039 | 0.042 | 0.75 | 0.71 | 0.825 |
| 5159 | chr10 | 44880245 | 44880845 | 0.082 | 0.025 | 0.027 | 0.75 | 0.74 | 0.825 |
| 5160 | chr12 | 1.15E+08 | 1.15E+08 | 0.067 | 0.032 | 0.034 | 0.75 | 0.74 | 0.825 |
| 5161 | chr10 | 44880242 | 44880842 | 0.082 | 0.025 | 0.027 | 0.75 | 0.74 | 0.825 |
| 5162 | chr10 | 44880262 | 44880862 | 0.082 | 0.025 | 0.027 | 0.75 | 0.74 | 0.825 |
| 5163 | chr10 | 44880259 | 44880859 | 0.082 | 0.025 | 0.027 | 0.75 | 0.74 | 0.825 |
| 5164 | chr16 | 6069366 | 6069966 | 0.164 | 0.087 | 0.095 | 0.75 | 0.76 | 0.824 |
| 5165 | chr1 | 50513627 | 50514227 | 0.124 | 0.05 | 0.054 | 0.75 | 0.76 | 0.823 |
| 5166 | chr16 | 62069786 | 62070386 | 0.081 | 0.039 | 0.042 | 0.75 | 0.71 | 0.823 |
| 5167 | chr1 | 50513570 | 50514170 | 0.124 | 0.05 | 0.054 | 0.75 | 0.76 | 0.823 |
| 5168 | chr14 | 38678237 | 38678837 | 0.09 | 0.047 | 0.051 | 0.75 | 0.75 | 0.823 |
| 5169 | chr14 | 38678120 | 38678720 | 0.09 | 0.047 | 0.051 | 0.75 | 0.75 | 0.823 |
| 5170 | chr8 | 73163719 | 73164319 | 0.077 | 0.031 | 0.035 | 0.75 | 0.75 | 0.823 |
| 5171 | chr8 | 73163724 | 73164324 | 0.077 | 0.031 | 0.035 | 0.75 | 0.75 | 0.823 |
| 5172 | chr14 | 38678245 | 38678845 | 0.09 | 0.047 | 0.051 | 0.75 | 0.75 | 0.823 |
| 5173 | chr16 | 62069772 | 62070372 | 0.081 | 0.039 | 0.042 | 0.75 | 0.71 | 0.823 |
| 5174 | chr7 | 70597621 | 70598221 | 0.115 | 0.054 | 0.056 | 0.75 | 0.77 | 0.822 |
| 5175 | chr14 | 48144069 | 48144669 | 0.116 | 0.054 | 0.059 | 0.75 | 0.72 | 0.822 |
| 5176 | chr14 | 48144014 | 48144614 | 0.116 | 0.054 | 0.059 | 0.75 | 0.72 | 0.822 |
| 5177 | chr14 | 48144039 | 48144639 | 0.116 | 0.054 | 0.059 | 0.75 | 0.72 | 0.822 |
| 5178 | chr1 | 77333449 | 77334049 | 0.066 | 0.018 | 0.021 | 0.75 | 0.68 | 0.822 |
| 5179 | chr14 | 48143980 | 48144580 | 0.116 | 0.054 | 0.059 | 0.75 | 0.72 | 0.822 |
| 5180 | chr4 | 21950466 | 21951066 | 0.122 | 0.062 | 0.07 | 0.75 | 0.75 | 0.821 |
| 5181 | chr19 | 21769015 | 21769615 | 0.13 | 0.037 | 0.04 | 0.75 | 0.76 | 0.821 |
| 5182 | chr5 | 1.29E+08 | 1.29E+08 | 0.077 | 0.038 | 0.042 | 0.75 | 0.7 | 0.821 |
| 5183 | chr9 | 1.05E+08 | 1.05E+08 | 0.08 | 0.035 | 0.038 | 0.75 | 0.76 | 0.821 |
| 5184 | chr5 | 1.29E+08 | 1.29E+08 | 0.077 | 0.038 | 0.042 | 0.75 | 0.7 | 0.821 |
| 5185 | chr4 | 21950564 | 21951164 | 0.122 | 0.062 | 0.07 | 0.75 | 0.75 | 0.821 |
| 5186 | chr19 | 21769130 | 21769730 | 0.13 | 0.037 | 0.04 | 0.75 | 0.76 | 0.821 |
| 5187 | chr19 | 21768890 | 21769490 | 0.13 | 0.037 | 0.04 | 0.75 | 0.76 | 0.821 |
| 5188 | chr14 | 29243104 | 29243704 | 0.112 | 0.072 | 0.078 | 0.75 | 0.75 | 0.821 |
| 5189 | chr9 | 1.05E+08 | 1.05 E+08 | 0.08 | 0.035 | 0.038 | 0.75 | 0.76 | 0.821 |
| 5190 | chr13 | 1.13E+08 | 1.13E+08 | 0.122 | 0.021 | 0.019 | 0.75 | 0.75 | 0.82 |
| 5191 | chr7 | 70597054 | 70597654 | 0.087 | 0.035 | 0.037 | 0.75 | 0.75 | 0.82 |
| 5192 | chr7 | 70597051 | 70597651 | 0.087 | 0.035 | 0.037 | 0.75 | 0.75 | 0.82 |
| 5193 | chr10 | 1.09E+08 | 1.09E+08 | 0.09 | 0.027 | 0.029 | 0.75 | 0.72 | 0.82 |
| 5194 | chr18 | 70209132 | 70209732 | 0.109 | 0.049 | 0.054 | 0.75 | 0.77 | 0.819 |
| 5195 | chr10 | 1.06E+08 | 1.06E+08 | 0.087 | 0.03 | 0.031 | 0.75 | 0.74 | 0.819 |
| 5196 | chr19 | 58609318 | 58609918 | 0.088 | 0.023 | 0.024 | 0.75 | 0.71 | 0.819 |
| 5197 | chr10 | 1.09E+08 | 1.09E+08 | 0.088 | 0.028 | 0.03 | 0.75 | 0.71 | 0.819 |
| 5198 | chr19 | 58609302 | 58609902 | 0.088 | 0.023 | 0.024 | 0.75 | 0.71 | 0.819 |
| 5199 | chr10 | 1.09E+08 | 1.09E+08 | 0.088 | 0.028 | 0.03 | 0.75 | 0.71 | 0.819 |
| 5200 | chr10 | 1.06E+08 | 1.06E+08 | 0.087 | 0.03 | 0.031 | 0.75 | 0.74 | 0.819 |
| 5201 | chr10 | 1.06E+08 | 1.06E+08 | 0.087 | 0.03 | 0.031 | 0.75 | 0.74 | 0.819 |
| 5202 | chr18 | 70209251 | 70209851 | 0.109 | 0.049 | 0.054 | 0.75 | 0.77 | 0.819 |
| 5203 | chr10 | 1.09E+08 | 1.09E+08 | 0.088 | 0.028 | 0.03 | 0.75 | 0.71 | 0.819 |
| 5204 | chr13 | 28366514 | 28367114 | 0.077 | 0.025 | 0.026 | 0.75 | 0.7 | 0.818 |
| 5205 | chr19 | 30015847 | 30016447 | 0.093 | 0.021 | 0.022 | 0.75 | 0.75 | 0.818 |
| 5206 | chr18 | 5543908 | 5544508 | 0.072 | 0.031 | 0.032 | 0.75 | 0.72 | 0.818 |
| 5207 | chr19 | 30015836 | 30016436 | 0.093 | 0.021 | 0.022 | 0.75 | 0.75 | 0.818 |
| 5208 | chr18 | 5543931 | 5544531 | 0.072 | 0.031 | 0.032 | 0.75 | 0.72 | 0.818 |
| 5209 | chr3 | 1.8E+08 | 1.8E+08 | 0.086 | 0.037 | 0.039 | 0.75 | 0.75 | 0.818 |
| 5210 | chr10 | 1.11E+08 | 1.11E+08 | 0.073 | 0.033 | 0.036 | 0.75 | 0.74 | 0.818 |
| 5211 | chr5 | 1.48E+08 | 1.48E+08 | 0.133 | 0.06 | 0.066 | 0.75 | 0.69 | 0.817 |
| 5212 | chr7 | 1.54E+08 | 1.54E+08 | 0.117 | 0.042 | 0.044 | 0.75 | 0.72 | 0.817 |
| 5213 | chr7 | 1.54E+08 | 1.54E+08 | 0.117 | 0.042 | 0.044 | 0.75 | 0.72 | 0.817 |
| 5214 | chr7 | 1.54E+08 | 1.54E+08 | 0.117 | 0.042 | 0.044 | 0.75 | 0.72 | 0.817 |
| 5215 | chr8 | 35093601 | 35094201 | 0.083 | 0.039 | 0.042 | 0.75 | 0.75 | 0.817 |
| 5216 | chr5 | 1.48E+08 | 1.48E+08 | 0.133 | 0.06 | 0.066 | 0.75 | 0.69 | 0.817 |
| 5217 | chr5 | 1.29E+08 | 1.29E+08 | 0.059 | 0.025 | 0.027 | 0.75 | 0.74 | 0.817 |
| 5218 | chr12 | 1.15E+08 | 1.15E+08 | 0.054 | 0.021 | 0.022 | 0.75 | 0.72 | 0.817 |
| 5219 | chr5 | 1.29E+08 | 1.29E+08 | 0.059 | 0.025 | 0.027 | 0.75 | 0.74 | 0.817 |
| 5220 | chr5 | 1.29E+08 | 1.29E+08 | 0.059 | 0.025 | 0.027 | 0.75 | 0.74 | 0.817 |
| 5221 | chr7 | 70597299 | 70597899 | 0.101 | 0.048 | 0.051 | 0.75 | 0.71 | 0.816 |
| 5222 | chr16 | 62070006 | 62070606 | 0.084 | 0.041 | 0.044 | 0.75 | 0.71 | 0.816 |
| 5223 | chr16 | 62070065 | 62070665 | 0.084 | 0.041 | 0.044 | 0.75 | 0.71 | 0.816 |
| 5224 | chr6 | 1.23E+08 | 1.23E+08 | 0.095 | 0.045 | 0.049 | 0.75 | 0.72 | 0.815 |
| 5225 | chr3 | 1.47E+08 | 1.47E+08 | 0.092 | 0.041 | 0.044 | 0.75 | 0.74 | 0.815 |
| 5226 | chr6 | 1.23E+08 | 1.23E+08 | 0.095 | 0.045 | 0.049 | 0.75 | 0.72 | 0.815 |
| 5227 | chr10 | 1.09E+08 | 1.09E+08 | 0.094 | 0.03 | 0.033 | 0.75 | 0.69 | 0.814 |
| 5228 | chr13 | 37247944 | 37248544 | 0.09 | 0.024 | 0.023 | 0.75 | 0.74 | 0.814 |
| 5229 | chr10 | 1.09E+08 | 1.09E+08 | 0.094 | 0.03 | 0.033 | 0.75 | 0.69 | 0.814 |
| 5230 | chr10 | 1.09E+08 | 1.09E+08 | 0.094 | 0.03 | 0.033 | 0.75 | 0.69 | 0.814 |
| 5231 | chr7 | 32110373 | 32110973 | 0.056 | 0.021 | 0.023 | 0.75 | 0.71 | 0.814 |
| 5232 | chr16 | 6068898 | 6069498 | 0.129 | 0.073 | 0.079 | 0.75 | 0.7 | 0.814 |
| 5233 | chr7 | 32110350 | 32110950 | 0.056 | 0.021 | 0.023 | 0.75 | 0.71 | 0.814 |
| 5234 | chr12 | 43945380 | 43945980 | 0.099 | 0.035 | 0.04 | 0.75 | 0.71 | 0.814 |
| 5235 | chr12 | 1.29E+08 | 1.29E+08 | 0.091 | 0.044 | 0.051 | 0.75 | 0.72 | 0.814 |
| 5236 | chr7 | 32110336 | 32110936 | 0.056 | 0.021 | 0.023 | 0.75 | 0.71 | 0.814 |
| 5237 | chr10 | 1.09E+08 | 1.09E+08 | 0.094 | 0.03 | 0.033 | 0.75 | 0.69 | 0.814 |
| 5238 | chr2 | 47797956 | 47798556 | 0.103 | 0.044 | 0.048 | 0.75 | 0.67 | 0.813 |
| 5239 | chr19 | 23257796 | 23258396 | 0.113 | 0.058 | 0.063 | 0.75 | 0.75 | 0.813 |
| 5240 | chr19 | 58446136 | 58446736 | 0.087 | 0.045 | 0.05 | 0.75 | 0.74 | 0.813 |
| 5241 | chr19 | 58570490 | 58571090 | 0.075 | 0.031 | 0.035 | 0.75 | 0.76 | 0.813 |
| 5242 | chr10 | 1.11E+08 | 1.11E+08 | 0.106 | 0.053 | 0.058 | 0.75 | 0.69 | 0.812 |
| 5243 | chr14 | 52734229 | 52734829 | 0.091 | 0.037 | 0.039 | 0.75 | 0.71 | 0.812 |
| 5244 | chr19 | 56915103 | 56915703 | 0.072 | 0.026 | 0.028 | 0.75 | 0.67 | 0.812 |
| 5245 | chr9 | 1.05E+08 | 1.05E+08 | 0.071 | 0.03 | 0.034 | 0.75 | 0.69 | 0.812 |
| 5246 | chr13 | 37247778 | 37248378 | 0.094 | 0.024 | 0.022 | 0.75 | 0.76 | 0.812 |
| 5247 | chr14 | 52734225 | 52734825 | 0.091 | 0.037 | 0.039 | 0.75 | 0.71 | 0.812 |
| 5248 | chr1 | 50513449 | 50514049 | 0.24 | 0.176 | 0.187 | 0.75 | 0.67 | 0.811 |
| 5249 | chr9 | 1.05E+08 | 1.05E+08 | 0.084 | 0.038 | 0.042 | 0.75 | 0.71 | 0.811 |
| 5250 | chr9 | 1.05E+08 | 1.05E+08 | 0.084 | 0.038 | 0.042 | 0.75 | 0.71 | 0.811 |
| 5251 | chr18 | 904551 | 905151 | 0.098 | 0.052 | 0.06 | 0.75 | 0.67 | 0.811 |
| 5252 | chr19 | 58545033 | 58545633 | 0.092 | 0.037 | 0.04 | 0.75 | 0.68 | 0.81 |
| 5253 | chr8 | 69242985 | 69243585 | 0.061 | 0.017 | 0.018 | 0.75 | 0.66 | 0.81 |
| 5254 | chr7 | 32110223 | 32110823 | 0.055 | 0.024 | 0.026 | 0.75 | 0.72 | 0.81 |
| 5255 | chr7 | 32110225 | 32110825 | 0.055 | 0.024 | 0.026 | 0.75 | 0.72 | 0.81 |
| 5256 | chr13 | 1.09E+08 | 1.09E+08 | 0.089 | 0.046 | 0.051 | 0.75 | 0.69 | 0.81 |
| 5257 | chr13 | 1.09E+08 | 1.09E+08 | 0.089 | 0.046 | 0.051 | 0.75 | 0.69 | 0.81 |
| 5258 | chr13 | 1.13E+08 | 1.13E+08 | 0.113 | 0.046 | 0.051 | 0.75 | 0.7 | 0.809 |
| 5259 | chr10 | 1.1E+08 | 1.1E+08 | 0.154 | 0.071 | 0.091 | 0.75 | 0.72 | 0.809 |
| 5260 | chr5 | 1.14E+08 | 1.14E+08 | 0.083 | 0.04 | 0.044 | 0.75 | 0.7 | 0.809 |
| 5261 | chr13 | 1.13E+08 | 1.13E+08 | 0.113 | 0.046 | 0.051 | 0.75 | 0.7 | 0.809 |
| 5262 | chr1 | 1.71E+08 | 1.71E+08 | 0.063 | 0.026 | 0.029 | 0.75 | 0.74 | 0.809 |
| 5263 | chr16 | 20084899 | 20085499 | 0.085 | 0.036 | 0.039 | 0.75 | 0.72 | 0.809 |
| 5264 | chr7 | 70597140 | 70597740 | 0.101 | 0.045 | 0.047 | 0.75 | 0.71 | 0.808 |
| 5265 | chr12 | 43945574 | 43946174 | 0.102 | 0.042 | 0.046 | 0.75 | 0.71 | 0.808 |
| 5266 | chr18 | 67067593 | 67068193 | 0.067 | 0.022 | 0.023 | 0.75 | 0.72 | 0.808 |
| 5267 | chr7 | 70597158 | 70597758 | 0.101 | 0.045 | 0.047 | 0.75 | 0.71 | 0.808 |
| 5268 | chr8 | 22089144 | 22089744 | 0.127 | 0.066 | 0.078 | 0.75 | 0.7 | 0.808 |
| 5269 | chr3 | 1.47E+08 | 1.47E+08 | 0.14 | 0.06 | 0.065 | 0.75 | 0.75 | 0.808 |
| 5270 | chr18 | 67067421 | 67068021 | 0.067 | 0.022 | 0.023 | 0.75 | 0.72 | 0.808 |
| 5271 | chr18 | 67067567 | 67068167 | 0.067 | 0.022 | 0.023 | 0.75 | 0.72 | 0.808 |
| 5272 | chr5 | 63801980 | 63802580 | 0.087 | 0.046 | 0.051 | 0.75 | 0.69 | 0.808 |
| 5273 | chr5 | 63801972 | 63802572 | 0.087 | 0.046 | 0.051 | 0.75 | 0.69 | 0.808 |
| 5274 | chr7 | 8473690 | 8474290 | 0.112 | 0.06 | 0.068 | 0.75 | 0.68 | 0.807 |
| 5275 | chr19 | 30017211 | 30017811 | 0.125 | 0.051 | 0.057 | 0.75 | 0.72 | 0.807 |
| 5276 | chr7 | 8473878 | 8474478 | 0.112 | 0.06 | 0.068 | 0.75 | 0.68 | 0.807 |
| 5277 | chr7 | 8473876 | 8474476 | 0.112 | 0.06 | 0.068 | 0.75 | 0.68 | 0.807 |
| 5278 | chr13 | 88324132 | 88324732 | 0.082 | 0.032 | 0.035 | 0.75 | 0.71 | 0.807 |
| 5279 | chr3 | 1.8E+08 | 1.8E+08 | 0.081 | 0.036 | 0.039 | 0.75 | 0.74 | 0.807 |
| 5280 | chr7 | 8473845 | 8474445 | 0.112 | 0.06 | 0.068 | 0.75 | 0.68 | 0.807 |
| 5281 | chr3 | 1.8E+08 | 1.8E+08 | 0.081 | 0.036 | 0.039 | 0.75 | 0.74 | 0.807 |
| 5282 | chr19 | 56915222 | 56915822 | 0.077 | 0.025 | 0.028 | 0.75 | 0.68 | 0.807 |
| 5283 | chr10 | 1.11E+08 | 1.11E+08 | 0.078 | 0.038 | 0.042 | 0.75 | 0.74 | 0.807 |
| 5284 | chr12 | 1.15E+08 | 1.15E+08 | 0.058 | 0.029 | 0.032 | 0.75 | 0.68 | 0.807 |
| 5285 | chr3 | 1.47E+08 | 1.47E+08 | 0.164 | 0.075 | 0.091 | 0.75 | 0.69 | 0.806 |
| 5286 | chr12 | 1.29E+08 | 1.29E+08 | 0.117 | 0.059 | 0.069 | 0.75 | 0.69 | 0.806 |
| 5287 | chr3 | 1.47E+08 | 1.47E+08 | 0.164 | 0.075 | 0.091 | 0.75 | 0.69 | 0.806 |
| 5288 | chr6 | 62995663 | 62996263 | 0.118 | 0.055 | 0.061 | 0.75 | 0.64 | 0.806 |
| 5289 | chr12 | 1.04E+08 | 1.04E+08 | 0.08 | 0.031 | 0.033 | 0.75 | 0.68 | 0.806 |
| 5290 | chr12 | 1.03E+08 | 1.03E+08 | 0.094 | 0.041 | 0.045 | 0.75 | 0.67 | 0.806 |
| 5291 | chr18 | 904578 | 905178 | 0.091 | 0.049 | 0.056 | 0.75 | 0.64 | 0.806 |
| 5292 | chr3 | 1.8E+08 | 1.8E+08 | 0.085 | 0.037 | 0.041 | 0.75 | 0.72 | 0.805 |
| 5293 | chr6 | 29521188 | 29521788 | 0.106 | 0.031 | 0.033 | 0.75 | 0.71 | 0.805 |
| 5294 | chr18 | 11148614 | 11149214 | 0.104 | 0.053 | 0.056 | 0.75 | 0.74 | 0.805 |
| 5295 | chr4 | 9782946 | 9783546 | 0.15 | 0.068 | 0.072 | 0.75 | 0.71 | 0.805 |
| 5296 | chr1 | 77333745 | 77334345 | 0.075 | 0.025 | 0.028 | 0.75 | 0.64 | 0.805 |
| 5297 | chr19 | 58609444 | 58610044 | 0.105 | 0.039 | 0.041 | 0.75 | 0.71 | 0.805 |
| 5298 | chr3 | 1.8E+08 | 1.8E+08 | 0.085 | 0.037 | 0.041 | 0.75 | 0.72 | 0.805 |
| 5299 | chr18 | 70534467 | 70535067 | 0.138 | 0.076 | 0.087 | 0.75 | 0.68 | 0.805 |
| 5300 | chr3 | 1.8E+08 | 1.8E+08 | 0.085 | 0.037 | 0.041 | 0.75 | 0.72 | 0.805 |
| 5301 | chr19 | 58609470 | 58610070 | 0.105 | 0.039 | 0.041 | 0.75 | 0.71 | 0.805 |
| 5302 | chr1 | 91190591 | 91191191 | 0.122 | 0.048 | 0.052 | 0.75 | 0.7 | 0.805 |
| 5303 | chr19 | 58609464 | 58610064 | 0.105 | 0.039 | 0.041 | 0.75 | 0.71 | 0.805 |
| 5304 | chr18 | 11148532 | 11149132 | 0.104 | 0.053 | 0.056 | 0.75 | 0.74 | 0.805 |
| 5305 | chr19 | 22805884 | 22806484 | 0.213 | 0.095 | 0.113 | 0.75 | 0.69 | 0.804 |
| 5306 | chr5 | 1.14E+08 | 1.14E+08 | 0.097 | 0.056 | 0.061 | 0.75 | 0.74 | 0.804 |
| 5307 | chr6 | 29521206 | 29521806 | 0.115 | 0.04 | 0.045 | 0.75 | 0.66 | 0.804 |
| 5308 | chr19 | 58570695 | 58571295 | 0.083 | 0.033 | 0.037 | 0.75 | 0.74 | 0.804 |
| 5309 | chr13 | 28366459 | 28367059 | 0.077 | 0.03 | 0.032 | 0.75 | 0.64 | 0.804 |
| 5310 | chr19 | 58570752 | 58571352 | 0.083 | 0.033 | 0.037 | 0.75 | 0.74 | 0.804 |
| 5311 | chr19 | 58609493 | 58610093 | 0.109 | 0.04 | 0.043 | 0.75 | 0.71 | 0.804 |
| 5312 | chr19 | 58609506 | 58610106 | 0.109 | 0.04 | 0.043 | 0.75 | 0.71 | 0.804 |
| 5313 | chr2 | 1.16E+08 | 1.16E+08 | 0.099 | 0.035 | 0.037 | 0.75 | 0.69 | 0.803 |
| 5314 | chr19 | 58545242 | 58545842 | 0.108 | 0.039 | 0.041 | 0.75 | 0.74 | 0.803 |
| 5315 | chr6 | 29521201 | 29521801 | 0.108 | 0.033 | 0.035 | 0.75 | 0.69 | 0.803 |
| 5316 | chr2 | 1.16E+08 | 1.16E+08 | 0.099 | 0.035 | 0.037 | 0.75 | 0.69 | 0.803 |
| 5317 | chr6 | 29521199 | 29521799 | 0.108 | 0.033 | 0.035 | 0.75 | 0.69 | 0.803 |
| 5318 | chr19 | 30015691 | 30016291 | 0.08 | 0.026 | 0.027 | 0.75 | 0.71 | 0.803 |
| 5319 | chr11 | 1.32E+08 | 1.32E+08 | 0.064 | 0.027 | 0.029 | 0.75 | 0.69 | 0.803 |
| 5320 | chr11 | 1.32E+08 | 1.32E+08 | 0.064 | 0.027 | 0.029 | 0.75 | 0.69 | 0.803 |
| 5321 | chr2 | 47798096 | 47798696 | 0.098 | 0.05 | 0.055 | 0.75 | 0.63 | 0.803 |
| 5322 | chr2 | 47798177 | 47798777 | 0.098 | 0.05 | 0.055 | 0.75 | 0.63 | 0.803 |
| 5323 | chr11 | 1.32E+08 | 1.32E+08 | 0.064 | 0.027 | 0.029 | 0.75 | 0.69 | 0.803 |
| 5324 | chr13 | 37248005 | 37248605 | 0.094 | 0.023 | 0.022 | 0.75 | 0.69 | 0.803 |
| 5325 | chr1 | 75602546 | 75603146 | 0.171 | 0.111 | 0.122 | 0.75 | 0.7 | 0.802 |
| 5326 | chr2 | 1.16E+08 | 1.16E+08 | 0.127 | 0.063 | 0.071 | 0.75 | 0.7 | 0.802 |
| 5327 | chr2 | 1.16E+08 | 1.16E+08 | 0.127 | 0.063 | 0.071 | 0.75 | 0.7 | 0.802 |
| 5328 | chr6 | 29521056 | 29521656 | 0.106 | 0.032 | 0.034 | 0.75 | 0.68 | 0.802 |
| 5329 | chr6 | 62995576 | 62996176 | 0.13 | 0.06 | 0.066 | 0.75 | 0.7 | 0.802 |
| 5330 | chr1 | 75602557 | 75603157 | 0.171 | 0.111 | 0.122 | 0.75 | 0.7 | 0.802 |
| 5331 | chr19 | 57182905 | 57183505 | 0.123 | 0.048 | 0.056 | 0.75 | 0.67 | 0.802 |
| 5332 | chr2 | 1.16E+08 | 1.16E+08 | 0.127 | 0.063 | 0.071 | 0.75 | 0.7 | 0.802 |
| 5333 | chr19 | 57182913 | 57183513 | 0.123 | 0.048 | 0.056 | 0.75 | 0.67 | 0.802 |
| 5334 | chr18 | 5196771 | 5197371 | 0.08 | 0.036 | 0.04 | 0.75 | 0.64 | 0.802 |
| 5335 | chr18 | 5196766 | 5197366 | 0.08 | 0.036 | 0.04 | 0.75 | 0.64 | 0.802 |
| 5336 | chr19 | 57182968 | 57183568 | 0.123 | 0.048 | 0.056 | 0.75 | 0.67 | 0.802 |
| 5337 | chr1 | 50513361 | 50513961 | 0.28 | 0.219 | 0.234 | 0.75 | 0.68 | 0.802 |
| 5338 | chr19 | 57182941 | 57183541 | 0.123 | 0.048 | 0.056 | 0.75 | 0.67 | 0.802 |
| 5339 | chr1 | 50513354 | 50513954 | 0.28 | 0.219 | 0.234 | 0.75 | 0.68 | 0.802 |
| 5340 | chr1 | 50513345 | 50513945 | 0.28 | 0.219 | 0.234 | 0.75 | 0.68 | 0.802 |
| 5341 | chr19 | 57182902 | 57183502 | 0.123 | 0.048 | 0.056 | 0.75 | 0.67 | 0.802 |
| 5342 | chr5 | 63802112 | 63802712 | 0.092 | 0.049 | 0.054 | 0.75 | 0.67 | 0.802 |
| 5343 | chr11 | 14995470 | 14996070 | 0.066 | 0.029 | 0.033 | 0.75 | 0.67 | 0.802 |
| 5344 | chr6 | 62995722 | 62996322 | 0.113 | 0.053 | 0.059 | 0.75 | 0.67 | 0.801 |
| 5345 | chr7 | 35293459 | 35294059 | 0.106 | 0.047 | 0.049 | 0.75 | 0.72 | 0.801 |
| 5346 | chr5 | 59189167 | 59189767 | 0.106 | 0.052 | 0.06 | 0.75 | 0.67 | 0.801 |
| 5347 | chr19 | 58095218 | 58095818 | 0.092 | 0.039 | 0.043 | 0.75 | 0.64 | 0.801 |
| 5348 | chr14 | 52535875 | 52536475 | 0.104 | 0.048 | 0.054 | 0.75 | 0.7 | 0.801 |
| 5349 | chr14 | 52535847 | 52536447 | 0.104 | 0.048 | 0.054 | 0.75 | 0.7 | 0.801 |
| 5350 | chr19 | 57183042 | 57183642 | 0.124 | 0.048 | 0.056 | 0.75 | 0.67 | 0.801 |
| 5351 | chr3 | 1.92E+08 | 1.92E+08 | 0.081 | 0.028 | 0.031 | 0.75 | 0.72 | 0.801 |
| 5352 | chr19 | 57182716 | 57183316 | 0.126 | 0.057 | 0.065 | 0.75 | 0.69 | 0.801 |
| 5353 | chr7 | 35293453 | 35294053 | 0.106 | 0.047 | 0.049 | 0.75 | 0.72 | 0.801 |
| 5354 | chr14 | 52535649 | 52536249 | 0.104 | 0.047 | 0.052 | 0.75 | 0.69 | 0.801 |
| 5355 | chr17 | 50235665 | 50236265 | 0.122 | 0.051 | 0.056 | 0.75 | 0.66 | 0.801 |
| 5356 | chr6 | 62995830 | 62996430 | 0.113 | 0.053 | 0.059 | 0.75 | 0.67 | 0.801 |
| 5357 | chr19 | 58095359 | 58095959 | 0.092 | 0.039 | 0.043 | 0.75 | 0.64 | 0.801 |
| 5358 | chr7 | 35293237 | 35293837 | 0.105 | 0.047 | 0.05 | 0.75 | 0.7 | 0.801 |
| 5359 | chr19 | 58095281 | 58095881 | 0.092 | 0.039 | 0.043 | 0.75 | 0.64 | 0.801 |
| 5360 | chr6 | 62995819 | 62996419 | 0.113 | 0.053 | 0.059 | 0.75 | 0.67 | 0.801 |
| 5361 | chr14 | 52535653 | 52536253 | 0.104 | 0.047 | 0.052 | 0.75 | 0.69 | 0.801 |
| 5362 | chr14 | 52535664 | 52536264 | 0.104 | 0.047 | 0.052 | 0.75 | 0.69 | 0.801 |
| 5363 | chr19 | 58095288 | 58095888 | 0.092 | 0.039 | 0.043 | 0.75 | 0.64 | 0.801 |
| 5364 | chrX | 8699872 | 8700472 | 0.049 | 0.018 | 0.02 | 0.75 | 0.7 | 0.801 |
| 5365 | chr1 | 1.15E+08 | 1.15E+08 | 0.063 | 0.026 | 0.029 | 0.75 | 0.68 | 0.801 |
| 5366 | chr14 | 52535722 | 52536322 | 0.104 | 0.047 | 0.052 | 0.75 | 0.69 | 0.801 |
| 5367 | chr19 | 58095295 | 58095895 | 0.092 | 0.039 | 0.043 | 0.75 | 0.64 | 0.801 |
| 5368 | chr14 | 52535587 | 52536187 | 0.104 | 0.047 | 0.052 | 0.75 | 0.69 | 0.801 |
| 5369 | chr7 | 43152242 | 43152842 | 0.071 | 0.032 | 0.034 | 0.75 | 0.71 | 0.801 |
| 5370 | chr7 | 43152168 | 43152768 | 0.071 | 0.032 | 0.034 | 0.75 | 0.71 | 0.801 |
| 5371 | chr3 | 1.92E+08 | 1.92E+08 | 0.081 | 0.028 | 0.031 | 0.75 | 0.72 | 0.801 |
| 5372 | chr3 | 1.92E+08 | 1.92E+08 | 0.081 | 0.028 | 0.031 | 0.75 | 0.72 | 0.801 |
| 5373 | chr16 | 12995303 | 12995903 | 0.118 | 0.063 | 0.072 | 0.75 | 0.64 | 0.801 |
| 5374 | chr1 | 1.71E+08 | 1.71E+08 | 0.082 | 0.05 | 0.058 | 0.75 | 0.67 | 0.801 |
| 5375 | chr19 | 57182818 | 57183418 | 0.128 | 0.053 | 0.061 | 0.75 | 0.67 | 0.8 |
| 5376 | chr14 | 52733953 | 52734553 | 0.095 | 0.044 | 0.048 | 0.75 | 0.67 | 0.8 |
| 5377 | chr1 | 2.37E+08 | 2.37E+08 | 0.109 | 0.046 | 0.051 | 0.75 | 0.67 | 0.8 |
| 5378 | chr14 | 52733986 | 52734586 | 0.095 | 0.044 | 0.048 | 0.75 | 0.67 | 0.8 |
| 5379 | chr14 | 52733951 | 52734551 | 0.095 | 0.044 | 0.048 | 0.75 | 0.67 | 0.8 |
| 5380 | chr1 | 77333956 | 77334556 | 0.079 | 0.025 | 0.028 | 0.75 | 0.64 | 0.8 |
| 5381 | chr1 | 77333770 | 77334370 | 0.079 | 0.025 | 0.028 | 0.75 | 0.64 | 0.8 |
| 5382 | chr1 | 77333907 | 77334507 | 0.079 | 0.025 | 0.028 | 0.75 | 0.64 | 0.8 |
| 5383 | chr14 | 52734025 | 52734625 | 0.095 | 0.044 | 0.048 | 0.75 | 0.67 | 0.8 |
| 5384 | chr14 | 52734094 | 52734694 | 0.095 | 0.044 | 0.048 | 0.75 | 0.67 | 0.8 |
| 5385 | chr8 | 69243186 | 69243786 | 0.06 | 0.019 | 0.021 | 0.75 | 0.67 | 0.8 |
| 5386 | chr8 | 69243210 | 69243810 | 0.06 | 0.019 | 0.021 | 0.75 | 0.67 | 0.8 |
| 5387 | chr1 | 1.66E+08 | 1.66E+08 | 0.083 | 0.046 | 0.047 | 0.75 | 0.74 | 0.8 |
| 5388 | chr1 | 1.66E+08 | 1.66E+08 | 0.083 | 0.046 | 0.047 | 0.75 | 0.74 | 0.8 |
| 5389 | chr19 | 58095168 | 58095768 | 0.089 | 0.038 | 0.042 | 0.75 | 0.66 | 0.8 |
| 5390 | chr14 | 52734097 | 52734697 | 0.095 | 0.044 | 0.048 | 0.75 | 0.67 | 0.8 |
| 5391 | chr1 | 75601868 | 75602467 | 0.126 | 0.046 | 0.048 | 0.75 | 0.8 | 0.86 |
| 5392 | chr7 | 153583701 | 153584375 | 0.114 | 0.029 | 0.027 | 0.75 | 0.83 | 0.858 |
| 5393 | chr8 | 85095225 | 85095824 | 0.095 | 0.035 | 0.038 | 0.75 | 0.8 | 0.855 |
| 5394 | chr11 | 131780961 | 131781560 | 0.133 | 0.035 | 0.036 | 0.75 | 0.82 | 0.851 |
| 5395 | chr8 | 72755932 | 72756681 | 0.091 | 0.029 | 0.03 | 0.75 | 0.76 | 0.845 |
| 5396 | chr14 | 38724342 | 38725008 | 0.124 | 0.038 | 0.042 | 0.75 | 0.79 | 0.839 |
| 5397 | chr18 | 70533999 | 70534598 | 0.129 | 0.053 | 0.06 | 0.75 | 0.77 | 0.839 |
| 5398 | chr6 | 123317188 | 123317787 | 0.093 | 0.038 | 0.042 | 0.75 | 0.71 | 0.837 |
| 5399 | chr4 | 21950268 | 21950867 | 0.111 | 0.046 | 0.05 | 0.75 | 0.79 | 0.835 |
| 5400 | chr19 | 30865857 | 30866531 | 0.116 | 0.032 | 0.032 | 0.75 | 0.77 | 0.834 |
| 5401 | chr13 | 112716945 | 112717544 | 0.169 | 0.082 | 0.088 | 0.75 | 0.77 | 0.827 |
| 5402 | chr16 | 6069102 | 6069701 | 0.154 | 0.077 | 0.084 | 0.75 | 0.76 | 0.825 |
| 5403 | chr14 | 48143898 | 48144497 | 0.108 | 0.053 | 0.058 | 0.75 | 0.72 | 0.825 |
| 5404 | chr13 | 37247945 | 37248544 | 0.09 | 0.024 | 0.023 | 0.75 | 0.74 | 0.814 |
| 5405 | chr1 | 50513450 | 50514049 | 0.24 | 0.176 | 0.187 | 0.75 | 0.67 | 0.811 |
| 5406 | chr3 | 147108544 | 147109143 | 0.164 | 0.075 | 0.091 | 0.75 | 0.69 | 0.806 |
| 5407 | chr13 | 28366477 | 28367151 | 0.077 | 0.03 | 0.032 | 0.75 | 0.64 | 0.804 |
| 5408 | chr14 | 52535876 | 52536475 | 0.104 | 0.048 | 0.054 | 0.75 | 0.7 | 0.801 |
| 5409 | chr6 | 29521121 | 29521720 | 0.105 | 0.031 | 0.034 | 0.75 | 0.67 | 0.799 |
| 5410 | chr12 | 126675749 | 126676348 | 0.133 | 0.056 | 0.062 | 0.75 | 0.64 | 0.798 |
| 5411 | chr13 | 79170004 | 79170603 | 0.148 | 0.074 | 0.082 | 0.75 | 0.67 | 0.784 |
| 5412 | chr6 | 96463603 | 96464202 | 0.117 | 0.059 | 0.062 | 0.75 | 0.71 | 0.78 |
| 5413 | chr18 | 74962373 | 74962972 | 0.136 | 0.065 | 0.072 | 0.75 | 0.63 | 0.771 |
| 5414 | chr13 | 112711710 | 112712309 | 0.112 | 0.04 | 0.043 | 0.75 | 0.66 | 0.768 |
| 5415 | chr1 | 237205085 | 237205684 | 0.269 | 0.191 | 0.203 | 0.75 | 0.66 | 0.766 |
| 5416 | chr11 | 32008662 | 32009261 | 0.152 | 0.084 | 0.098 | 0.75 | 0.64 | 0.761 |
| 5417 | chr7 | 32467358 | 32467957 | 0.114 | 0.053 | 0.057 | 0.75 | 0.64 | 0.747 |
| 5418 | chr19 | 22444294 | 22444893 | 0.157 | 0.101 | 0.111 | 0.75 | 0.62 | 0.739 |

[1826] The predicting of the presence, absence, or development of cancer in an individual may particularly involve determining percent methylated reference for the panel of one or more CpGs. A threshold percent methylated reference value may be applied in order to stratify an individual as having or not having cancer, or of having a high or low risk of CIN3 and/or cancer development, preferably wherein the cancer is cervical or endometrial cancer, more preferably wherein the cancer is cervical cancer.

[1827] In any of the assays described herein, the step of determining the methylation status of the one or more CpGs in the panel may comprise determining each CpG within:
[1828] 1. SEQ ID NO 5759 and/or SEQ ID NO 5703 and/or SEQ ID NO 5731, and wherein when the cancer index value is about 1.146 or more the individual is classified as having CIN3 and/or cervical cancer or as having a high risk of CIN3 and/or cervical cancer development, and wherein the sensitivity of the assay is at least 95.00%, the specificity of the assay is at least 75.00%, and the AUC is 0.96, preferably wherein the cancer index value is the percent methylated reference for sequence defined by SEQ ID NO 5759 and/or SEQ ID NO 5703 and/or SEQ ID NO 5731;
[1829] 2. SEQ ID NO 5759 and/or SEQ ID NO 5703 and/or SEQ ID NO 5731, and wherein when the cancer index value is less than about 1.146 the individual is classified as not having CIN3 and/or cervical cancer or as having a low risk of CIN3 and/or cervical cancer development, and wherein the sensitivity of the assay is at least 95.00%, the specificity of the assay is at least 75.00%, and the AUC is 0.96, preferably wherein the cancer index value is the percent methylated reference for sequence defined by SEQ ID NO 5759 and/or SEQ ID NO 5703 and/or SEQ ID NO 5731;
[1830] 3. SEQ ID NO 5760 and/or SEQ ID NO 5704 and/or SEQ ID NO 5732, and wherein when the cancer index value is about 0.473 or more the individual is classified as having CIN3 and/or cervical cancer or as having a high risk of CIN3 and/or cervical cancer development, and wherein the sensitivity of the assay is at least 75.00%, the specificity of the assay is at least 85.00%, and the AUC is 0.96, preferably wherein the cancer index value is the percent methylated reference for sequence defined by SEQ ID NO 5760 and/or SEQ ID NO 5704 and/or SEQ ID NO 5732;
[1831] 4. SEQ ID NO 5760 and/or SEQ ID NO 5704 and/or SEQ ID NO 5732, and wherein when the cancer index value is less than about 0.473 the individual is classified as not having CIN3 and/or cervical cancer or as having a low risk of CIN3 and/or cervical cancer development, and wherein the sensitivity of the assay is at least 75.00%, the specificity of the assay is at least 85.00%, and the AUC is 0.96, preferably wherein the cancer index value is the percent methylated reference for sequence defined by SEQ ID NO 5760 and/or SEQ ID NO 5704 and/or SEQ ID NO 5732;
[1832] 5. SEQ ID NO 5761 and/or SEQ ID NO 5705 and/or SEQ ID NO 5733, and wherein when the cancer index value is about 1.546 or more the individual is classified as having CIN3 and/or cervical cancer or as having a high risk of CIN3 and/or cervical cancer development, and wherein the sensitivity of the assay is at least 95.00%, the specificity of the assay is at least 75.00%, and the AUC is 0.95, preferably wherein the cancer index value is the percent methylated reference for sequence defined by SEQ ID NO 5761 and/or SEQ ID NO 5705 and/or SEQ ID NO 5733;
[1833] 6. SEQ ID NO 5761 and/or SEQ ID NO 5705 and/or SEQ ID NO 5733, and wherein when the cancer index value is less than about 1.546 the individual is classified as not having CIN3 and/or cervical cancer or as having a low risk of CIN3 and/or cervical cancer development, and wherein the sensitivity of the assay is at least 95.00%, the specificity of the assay is at least 75.00%, and the AUC is 0.95, preferably wherein the cancer index value is the percent methylated reference for sequence defined by SEQ ID NO 5761 and/or SEQ ID NO 5705 and/or SEQ ID NO 5733;
[1834] 7. SEQ ID NO 5762 and/or SEQ ID NO 5706 and/or SEQ ID NO 5734, and wherein when the cancer index value is about 1.645 or more the individual is classified as having CIN3 and/or cervical cancer or as having a high risk of CIN3 and/or cervical cancer development, and wherein the sensitivity of the assay is at least 85.00%, the specificity of the assay is at least 75.00%, and the AUC is 0.94, preferably wherein the cancer index value is the percent methylated reference for sequence defined by SEQ ID NO 5762 and/or SEQ ID NO 5706 and/or SEQ ID NO 5734;
[1835] 8. SEQ ID NO 5762 and/or SEQ ID NO 5706 and/or SEQ ID NO 5734, and wherein when the cancer index value is less than about 1.645 the individual is classified as not having CIN3 and/or cervical cancer or as having a low risk of CIN3 and/or cervical cancer development, and wherein the sensitivity of the assay is at least 85.00%, the specificity of the assay is at least 75.00%, and the AUC is 0.94, preferably wherein the cancer index value is the percent methylated reference for sequence defined by SEQ ID NO 5762 and/or SEQ ID NO 5706 and/or SEQ ID NO 5734;
[1836] 9. SEQ ID NO 5763 and/or SEQ ID NO 5707 and/or SEQ ID NO 5735, and wherein when the cancer index value is about 2.824 or more the individual is classified as having CIN3 and/or cervical cancer or as having a high risk of CIN3 and/or cervical cancer development, and wherein the sensitivity of the assay is at least 90.00%, the specificity of the assay is at least 75.00%, and the AUC is 0.94, preferably wherein the cancer index value is the percent methylated reference for sequence defined by SEQ ID NO 5763 and/or SEQ ID NO 5707 and/or SEQ ID NO 5735;
[1837] 10. SEQ ID NO 5763 and/or SEQ ID NO 5707 and/or SEQ ID NO 5735, and wherein when the cancer index value is less than about 2.824 the individual is classified as not having CIN3 and/or cervical cancer or as having a low risk of CIN3 and/or cervical cancer development, and wherein the sensitivity of the assay is at least 90.00%, the specificity of the assay is at least 75.00%, and the AUC is 0.94, preferably wherein the cancer index value is the percent methylated reference for sequence defined by SEQ ID NO 5763 and/or SEQ ID NO 5707 and/or SEQ ID NO 5735;
[1838] 11. SEQ ID NO 5764 and/or SEQ ID NO 5708 and/or SEQ ID NO 5736, and wherein when the cancer index value is about 2.968 or more the individual is classified as having CIN3 and/or cervical cancer or as having a high risk of CIN3 and/or cervical cancer development, and wherein the sensitivity of the assay is at least 85.00%, the specificity of the assay is at least 75.00%, and the AUC is 0.94, preferably wherein the cancer index value is the percent methylated reference for sequence defined by SEQ ID NO 5764 and/or SEQ ID NO 5708 and/or SEQ ID NO 5736;
[1839] 12. SEQ ID NO 5764 and/or SEQ ID NO 5708 and/or SEQ ID NO 5736, and wherein when the cancer index value is less than about 2.968 the individual is classified as not having CIN3 and/or cervical cancer or as having a low risk of CIN3 and/or cervical cancer development, and wherein the sensitivity of the assay is at least 85.00%, the specificity of the assay is at least 75.00%, and the AUC is 0.94, preferably wherein the cancer index value is the percent methylated reference for sequence defined by SEQ ID NO 5764 and/or SEQ ID NO 5708 and/or SEQ ID NO 5736;
[1840] 13. SEQ ID NO 5765 and/or SEQ ID NO 5709 and/or SEQ ID NO 5737, and wherein when the cancer index value is about 0.184 or more the individual is classified as having CIN3 and/or cervical cancer or as having a high risk of CIN3 and/or cervical cancer development, and wherein the sensitivity of the assay is at least 75.00%, the specificity of the assay is at least 80.00%, and the AUC is 0.93, preferably wherein the cancer index value is the percent methylated reference for sequence defined by SEQ ID NO 5765 and/or SEQ ID NO 5709 and/or SEQ ID NO 5737;
[1841] 14. SEQ ID NO 5765 and/or SEQ ID NO 5709 and/or SEQ ID NO 5737, and wherein when the cancer index value is less than about 0.184 the individual is classified as not having CIN3 and/or cervical cancer or as having a low risk of CIN3 and/or cervical cancer development, and wherein the sensitivity of the assay is at least 93.00%, the specificity of the assay is at least 80.00%, and the AUC is 0.75, preferably wherein the cancer index value is the percent methylated reference for sequence defined by SEQ ID NO 5765 and/or SEQ ID NO 5709 and/or SEQ ID NO 5737;
[1842] 15. SEQ ID NO 5766 and/or SEQ ID NO 5710 and/or SEQ ID NO 5738, and wherein when the cancer index value is about 0.716 or more the individual is classified as having CIN3 and/or cervical cancer or as having a high risk of CIN3 and/or cervical cancer development, and wherein the sensitivity of the assay is at least 90.00%, the specificity of the assay is at least 75.00%, and the AUC is 0.93, preferably wherein the cancer index value is the percent methylated reference for sequence defined by SEQ ID NO 5766 and/or SEQ ID NO 5710 and/or SEQ ID NO 5738;
[1843] 16. SEQ ID NO 5766 and/or SEQ ID NO 5710 and/or SEQ ID NO 5738, and wherein when the cancer index value is less than about 0.716 the individual is classified as not having CIN3 and/or cervical cancer or as having a low risk of CIN3 and/or cervical cancer development, and wherein the sensitivity of the assay is at least 90.00%, the specificity of the assay is at least 75.00%, and the AUC is 0.93, preferably wherein the cancer index value is the percent methylated reference for sequence defined by SEQ ID NO 5766 and/or SEQ ID NO 5710 and/or SEQ ID NO 5738;
[1844] 17. SEQ ID NO 5767 and/or SEQ ID NO 5711 and/or SEQ ID NO 5739, and wherein when the cancer index value is about 3.482 or more the individual is classified as having CIN3 and/or cervical cancer or as having a high risk of CIN3 and/or cervical cancer development, and wherein the sensitivity of the assay is at least 85.00%, the specificity of the assay is at least 75.00%, and the AUC is 0.93, preferably wherein the cancer index value is the percent methylated reference for sequence defined by SEQ ID NO 5767 and/or SEQ ID NO 5711 and/or SEQ ID NO 5739;
[1845] 18. SEQ ID NO 5767 and/or SEQ ID NO 5711 and/or SEQ ID NO 5739, and wherein when the cancer index value is less than about 3.482 the individual is classified as not having CIN3 and/or cervical cancer or as having a low risk of CIN3 and/or cervical cancer development, and wherein the sensitivity of the assay is at least 85.00%, the specificity of the assay is at least 75.00%, and the AUC is 0.93, preferably wherein the cancer index value is the percent methylated reference for sequence defined by SEQ ID NO 5767 and/or SEQ ID NO 5711 and/or SEQ ID NO 5739;
[1846] 19. SEQ ID NO 5768 and/or SEQ ID NO 5712 and/or SEQ ID NO 5740, and wherein when the cancer index value is about 3.818 or more the individual is classified as having CIN3 and/or cervical cancer or as having a high risk of CIN3 and/or cervical cancer development, and wherein the sensitivity of the assay is at least 90.00%, the specificity of the assay is at least 75.00%, and the AUC is 0.92, preferably wherein the cancer index value is the percent methylated reference for sequence defined by SEQ ID NO 5768 and/or SEQ ID NO 5712 and/or SEQ ID NO 5740;
[1847] 20. SEQ ID NO 5768 and/or SEQ ID NO 5712 and/or SEQ ID NO 5740, and wherein when the cancer index value is less than about 3.818 the individual is classified as not having CIN3 and/or cervical cancer or as having a low risk of CIN3 and/or cervical cancer development, and wherein the sensitivity of the assay is at least 90.00%, the specificity of the assay is at least 75.00%, and the AUC is 0.92, preferably wherein the cancer index value is the percent methylated reference for sequence defined by SEQ ID NO 5768 and/or SEQ ID NO 5712 and/or SEQ ID NO 5740;
[1848] 21. SEQ ID NO 5769 and/or SEQ ID NO 5713 and/or SEQ ID NO 5741, and wherein when the cancer index value is about 0.295 or more the individual is classified as having CIN3 and/or cervical cancer or as having a high risk of CIN3 and/or cervical cancer development, and wherein the sensitivity of the assay is at least 80.00%, the specificity of the assay is at least 75.00%, and the AUC is 0.92, preferably wherein the cancer index value is the percent methylated reference for sequence defined by SEQ ID NO 5769 and/or SEQ ID NO 5713 and/or SEQ ID NO 5741;
[1849] 22. SEQ ID NO 5769 and/or SEQ ID NO 5713 and/or SEQ ID NO 5741, and wherein when the cancer index value is less than about 0.295 the individual is classified as not having CIN3 and/or cervical cancer or as having a low risk of CIN3 and/or cervical cancer development, and wherein the sensitivity of the assay is at least 80.00%, the specificity of the assay is at least 75.00%, and the AUC is 0.92, preferably wherein the cancer index value is the percent methylated reference for sequence defined by SEQ ID NO 5769 and/or SEQ ID NO 5713 and/or SEQ ID NO 5741;
[1850] 23. SEQ ID NO 5770 and/or SEQ ID NO 5714 and/or SEQ ID NO 5742, and wherein when the cancer index value is about 1.725 or more the individual is classified as having CIN3 and/or cervical cancer or as having a high risk of CIN3 and/or cervical cancer development, and wherein the sensitivity of the assay is at least 75.00%, the specificity of the assay is at least 75.00%, and the AUC is 0.92, preferably wherein the cancer index value is the percent methylated reference for sequence defined by SEQ ID NO 5770 and/or SEQ ID NO 5714 and/or SEQ ID NO 5742;
[1851] 24. SEQ ID NO 5770 and/or SEQ ID NO 5714 and/or SEQ ID NO 5742, and wherein when the cancer index value is less than about 1.725 the individual is classified as not having CIN3 and/or cervical cancer or as having a low risk of CIN3 and/or cervical cancer development, and wherein the sensitivity of the assay is at least 75.00%, the specificity of the assay is at least 75.00%, and the AUC is 0.92, preferably wherein the cancer index value is the percent methylated reference for sequence defined by SEQ ID NO 5770 and/or SEQ ID NO 5714 and/or SEQ ID NO 5742;
[1852] 25. SEQ ID NO 5771 and/or SEQ ID NO 5715 and/or SEQ ID NO 5743, and wherein when the cancer index value is about 3.258 or more the individual is classified as having CIN3 and/or cervical cancer or as having a high risk of CIN3 and/or cervical cancer development, and wherein the sensitivity of the assay is at least 90.00%, the specificity of the assay is at least 75.00%, and the AUC is 0.92, preferably wherein the cancer index value is the percent methylated reference for sequence defined by SEQ ID NO 5771 and/or SEQ ID NO 5715 and/or SEQ ID NO 5743;
[1853] 26. SEQ ID NO 5771 and/or SEQ ID NO 5715 and/or SEQ ID NO 5743, and wherein when the cancer index value is less than about 3.258 the individual is classified as not having CIN3 and/or cervical cancer or as having a low risk of CIN3 and/or cervical cancer development, and wherein the sensitivity of the assay is at least 90.00%, the specificity of the assay is at least 75.00%, and the AUC is 0.92, preferably wherein the cancer index value is the percent methylated reference for sequence defined by SEQ ID NO 5771 and/or SEQ ID NO 5715 and/or SEQ ID NO 5743;
[1854] 27. SEQ ID NO 5772 and/or SEQ ID NO 5716 and/or SEQ ID NO 5744, and wherein when the cancer index value is about 4.731 or more the individual is classified as having CIN3 and/or cervical cancer or as having a high risk of CIN3 and/or cervical cancer development, and wherein the sensitivity of the assay is at least 85.00%, the specificity of the assay is at least 75.00%, and the AUC is 0.92, preferably wherein the cancer index value is the percent methylated reference for sequence defined by SEQ ID NO 5772 and/or SEQ ID NO 5716 and/or SEQ ID NO 5744;
[1855] 28. SEQ ID NO 5772 and/or SEQ ID NO 5716 and/or SEQ ID NO 5744, and wherein when the cancer index value is less than about 4.731 the individual is classified as not having CIN3 and/or cervical cancer or as having a low risk of CIN3 and/or cervical cancer development, and wherein the sensitivity of the assay is at least 85.00%, the specificity of the assay is at least 75.00%, and the AUC is 0.92, preferably wherein the cancer index value is the percent methylated reference for sequence defined by SEQ ID NO 5772 and/or SEQ ID NO 5716 and/or SEQ ID NO 5744;
[1856] 29. SEQ ID NO 5773 and/or SEQ ID NO 5717 and/or SEQ ID NO 5745, and wherein when the cancer index value is about 1.427 or more the individual is classified as having CIN3 and/or cervical cancer or as having a high risk of CIN3 and/or cervical cancer development, and wherein the sensitivity of the assay is at least 80.00%, the specificity of the assay is at least 75.00%, and the AUC is 0.92, preferably wherein the cancer index value is the percent methylated reference for sequence defined by SEQ ID NO 5773 and/or SEQ ID NO 5717 and/or SEQ ID NO 5745;
[1857] 30. SEQ ID NO 5773 and/or SEQ ID NO 5717 and/or SEQ ID NO 5745, and wherein when the cancer index value is less than about 1.427 the individual is classified as not having CIN3 and/or cervical cancer or as having a low risk of CIN3 and/or cervical cancer development, and wherein the sensitivity of the assay is at least 80.00%, the specificity of the assay is at least 75.00%, and the AUC is 0.92, preferably wherein the cancer index value is the percent methylated reference for sequence defined by SEQ ID NO 5773 and/or SEQ ID NO 5717 and/or SEQ ID NO 5745;
[1858] 31. SEQ ID NO 5774 and/or SEQ ID NO 5718 and/or SEQ ID NO 5746, and wherein when the cancer index value is about 4.511 or more the individual is classified as having CIN3 and/or cervical cancer or as having a high risk of CIN3 and/or cervical cancer development, and wherein the sensitivity of the assay is at least 85.00%, the specificity of the assay is at least 75.00%, and the AUC is 0.92, preferably wherein the cancer index value is the percent methylated reference for sequence defined by SEQ ID NO 5774 and/or SEQ ID NO 5718 and/or SEQ ID NO 5746;
[1859] 32. SEQ ID NO 5774 and/or SEQ ID NO 5718 and/or SEQ ID NO 5746, and wherein when the cancer index value is less than about 4.511 the individual is classified as not having CIN3 and/or cervical cancer or as having a low risk of CIN3 and/or cervical cancer development, and wherein the sensitivity of the assay is at least 85.00%, the specificity of the assay is at least 75.00%, and the AUC is 0.92, preferably wherein the cancer index value is the percent methylated reference for sequence defined by SEQ ID NO 5774 and/or SEQ ID NO 5718 and/or SEQ ID NO 5746;
[1860] 33. SEQ ID NO 5775 and/or SEQ ID NO 5719 and/or SEQ ID NO 5747, and wherein when the cancer index value is about 6.894 or more the individual is classified as having CIN3 and/or cervical cancer or as having a high risk of CIN3 and/or cervical cancer development, and wherein the sensitivity of the assay is at least 90.00%, the specificity of the assay is at least 75.00%, and the AUC is 0.92, preferably wherein the cancer index value is the percent methylated reference for sequence defined by SEQ ID NO 5775 and/or SEQ ID NO 5719 and/or SEQ ID NO 5747;
[1861] 34. SEQ ID NO 5775 and/or SEQ ID NO 5719 and/or SEQ ID NO 5747, and wherein when the cancer index value is less than about 6.894 the individual is classified as not having CIN3 and/or cervical cancer or as having a low risk of CIN3 and/or cervical cancer development, and wherein the sensitivity of the assay is at least 90.00%, the specificity of the assay is at least 75.00%, and the AUC is 0.92, preferably wherein the cancer index value is the percent methylated reference for sequence defined by SEQ ID NO 5775 and/or SEQ ID NO 5719 and/or SEQ ID NO 5747;
[1862] 35. SEQ ID NO 5776 and/or SEQ ID NO 5720 and/or SEQ ID NO 5748, and wherein when the cancer index value is about 3.934 or more the individual is classified as having CIN3 and/or cervical cancer or as having a high risk of CIN3 and/or cervical cancer development, and wherein the sensitivity of the assay is at least 85.00%, the specificity of the assay is at least 75.00%, and the AUC is 0.92, preferably wherein the cancer index value is the percent methylated reference for sequence defined by SEQ ID NO 5776 and/or SEQ ID NO 5720 and/or SEQ ID NO 5748;
[1863] 36. SEQ ID NO 5776 and/or SEQ ID NO 5720 and/or SEQ ID NO 5748, and wherein when the cancer index value is less than about 3.934 or more the individual is classified as not having CIN3 and/or cervical cancer or as having a low risk of CIN3 and/or cervical cancer development, and wherein the sensitivity of the assay is at least 85.00%, the specificity of the assay is at least 75.00%, and the AUC is 0.92, preferably wherein the cancer index value is the percent methylated reference for sequence defined by SEQ ID NO 5776 and/or SEQ ID NO 5720 and/or SEQ ID NO 5748;
[1864] 37. SEQ ID NO 5777 and/or SEQ ID NO 5721 and/or SEQ ID NO 5749, and wherein when the cancer index value is about 4.153 or more the individual is classified as having CIN3 and/or cervical cancer or as having a high risk of CIN3 and/or cervical cancer development, and wherein the sensitivity of the assay is at least 85.00%, the specificity of the assay is at least 75.00%, and the AUC is 0.92, preferably wherein the cancer index value is the percent methylated reference for sequence defined by SEQ ID NO 5777 and/or SEQ ID NO 5721 and/or SEQ ID NO 5749;
[1865] 38. SEQ ID NO 5777 and/or SEQ ID NO 5721 and/or SEQ ID NO 5749, and wherein when the cancer index value is less than about 4.153 the individual is classified as not having CIN3 and/or cervical cancer or as having a low risk of CIN3 and/or cervical cancer development, and wherein the sensitivity of the assay is at least 85.00%, the specificity of the assay is at least 75.00%, and the AUC is 0.92, preferably wherein the cancer index value is the percent methylated reference for sequence defined by SEQ ID NO 5777 and/or SEQ ID NO 5721 and/or SEQ ID NO 5749;
[1866] 39. SEQ ID NO 5778 and/or SEQ ID NO 5722 and/or SEQ ID NO 5750, and wherein when the cancer index value is about 0.468 or more the individual is classified as having CIN3 and/or cervical cancer or as having a high risk of CIN3 and/or cervical cancer development, and wherein the sensitivity of the assay is at least 85.00%, the specificity of the assay is at least 75.00%, and the AUC is 0.91, preferably wherein the cancer index value is the percent methylated reference for sequence defined by SEQ ID NO 5778 and/or SEQ ID NO 5722 and/or SEQ ID NO 5750;
[1867] 40. SEQ ID NO 5778 and/or SEQ ID NO 5722 and/or SEQ ID NO 5750, and wherein when the cancer index value is less than about 0.468 the individual is classified as not having CIN3 and/or cervical cancer or as having a low risk of CIN3 and/or cervical cancer development, and wherein the sensitivity of the assay is at least 85.00%, the specificity of the assay is at least 75.00%, and the AUC is 0.91, preferably wherein the cancer index value is the percent methylated reference for sequence defined by SEQ ID NO 5778 and/or SEQ ID NO 5722 and/or SEQ ID NO 5750;
[1868] 41. SEQ ID NO 5779 and/or SEQ ID NO 5723 and/or SEQ ID NO 5751, and wherein when the cancer index value is about 2.226 or more the individual is classified as having CIN3 and/or cervical cancer or as having a high risk of CIN3 and/or cervical cancer development, and wherein the sensitivity of the assay is at least 90.00%, the specificity of the assay is at least 75.00%, and the AUC is 0.90, preferably wherein the cancer index value is the percent methylated reference for sequence defined by SEQ ID NO 5779 and/or SEQ ID NO 5723 and/or SEQ ID NO 5751;
[1869] 42. SEQ ID NO 5779 and/or SEQ ID NO 5723 and/or SEQ ID NO 5751, and wherein when the cancer index value is less than about 2.226 the individual is classified as not having CIN3 and/or cervical cancer or as having a low risk of CIN3 and/or cervical cancer development, and wherein the sensitivity of the assay is at least 90.00%, the specificity of the assay is at least 75.00%, and the AUC is 0.90, preferably wherein the cancer index value is the percent methylated reference for sequence defined by SEQ ID NO 5779 and/or SEQ ID NO 5723 and/or SEQ ID NO 5751;
[1870] 43. SEQ ID NO 5780 and/or SEQ ID NO 5724 and/or SEQ ID NO 5752, and wherein when the cancer index value is about 6.942 or more the individual is classified as having CIN3 and/or cervical cancer or as having a high risk of CIN3 and/or cervical cancer development, and wherein the sensitivity of the assay is at least 85.00%, the specificity of the assay is at least 75.00%, and the AUC is 0.90, preferably wherein the cancer index value is the percent methylated reference for sequence defined by SEQ ID NO 5780 and/or SEQ ID NO 5724 and/or SEQ ID NO 5752;
[1871] 44. SEQ ID NO 5780 and/or SEQ ID NO 5724 and/or SEQ ID NO 5752, and wherein when the cancer index value is less than about 6.942 the individual is classified as not having CIN3 and/or cervical cancer or as having a low risk of CIN3 and/or cervical cancer development, and wherein the sensitivity of the assay is at least 85.00%, the specificity of the assay is at least 75.00%, and the AUC is 0.90, preferably wherein the cancer index value is the percent methylated reference for sequence defined by SEQ ID NO 5780 and/or SEQ ID NO 5724 and/or SEQ ID NO 5752;
[1872] 45. SEQ ID NO 5781 and/or SEQ ID NO 5725 and/or SEQ ID NO 5753, and wherein when the cancer index value is about 1.955 or more the individual is classified as having CIN3 and/or cervical cancer or as having a high risk of CIN3 and/or cervical cancer development, and wherein the sensitivity of the assay is at least 80.00%, the specificity of the assay is at least 75.00%, and the AUC is 0.90, preferably wherein the cancer index value is the percent methylated reference for sequence defined by SEQ ID NO 5781 and/or SEQ ID NO 5725 and/or SEQ ID NO 5753;
[1873] 46. SEQ ID NO 5781 and/or SEQ ID NO 5725 and/or SEQ ID NO 5753, and wherein when the cancer index value is less than about 1.955 the individual is classified as not having CIN3 and/or cervical cancer or as having a low risk of CIN3 and/or cervical cancer development, and wherein the sensitivity of the assay is at least 80.00%, the specificity of the assay is at least 75.00%, and the AUC is 0.90, preferably wherein the cancer index value is the percent methylated reference for sequence defined by SEQ ID NO 5781 and/or SEQ ID NO 5725 and/or SEQ ID NO 5753;
[1874] 47. SEQ ID NO 5782 and/or SEQ ID NO 5726 and/or SEQ ID NO 5754, and wherein when the cancer index value is about 5.005 or more the individual is classified as having CIN3 and/or cervical cancer or as having a high risk of CIN3 and/or cervical cancer development, and wherein the sensitivity of the assay is at least 75.00%, the specificity of the assay is at least 75.00%, and the AUC is 0.88, preferably wherein the cancer index value is the percent methylated reference for sequence defined by SEQ ID NO 5782 and/or SEQ ID NO 5726 and/or SEQ ID NO 5754;
[1875] 48. SEQ ID NO 5782 and/or SEQ ID NO 5726 and/or SEQ ID NO 5754, and wherein when the cancer index value is less than about 5.005 the individual is classified as not having CIN3 and/or cervical cancer or as having a low risk of CIN3 and/or cervical cancer development, and wherein the sensitivity of the assay is at least 75.00%, the specificity of the assay is at least 75.00%, and the AUC is 0.88, preferably wherein the cancer index value is the percent methylated reference for sequence defined by SEQ ID NO 5782 and/or SEQ ID NO 5726 and/or SEQ ID NO 5754;
[1876] 49. SEQ ID NO 5783 and/or SEQ ID NO 5727 and/or SEQ ID NO 5755, and wherein when the cancer index value is about 5.315 or more the individual is classified as having CIN3 and/or cervical cancer or as having a high risk of CIN3 and/or cervical cancer development, and wherein the sensitivity of the assay is at least 80.00%, the specificity of the assay is at least 75.00%, and the AUC is 0.86, preferably wherein the cancer index value is the percent methylated reference for sequence defined by SEQ ID NO 5783 and/or SEQ ID NO 5727 and/or SEQ ID NO 5755;
[1877] 50. SEQ ID NO 5783 and/or SEQ ID NO 5727 and/or SEQ ID NO 5755, and wherein when the cancer index value is less than about 5.315 the individual is classified as not having CIN3 and/or cervical cancer or as having a low risk of CIN3 and/or cervical cancer development, and wherein the sensitivity of the assay is at least 80.00%, the specificity of the assay is at least 75.00%, and the AUC is 0.86, preferably wherein the cancer index value is the percent methylated reference for sequence defined by SEQ ID NO 5783 and/or SEQ ID NO 5727 and/or SEQ ID NO 5755;
[1878] 51. SEQ ID NO 5784 and/or SEQ ID NO 5728 and/or SEQ ID NO 5756, and wherein when the cancer index value is about 5.381 or more the individual is classified as having CIN3 and/or cervical cancer or as having a high risk of CIN3 and/or cervical cancer development, and wherein the sensitivity of the assay is at least 70.00%, the specificity of the assay is at least 75.00%, and the AUC is 0.85, preferably wherein the cancer index value is the percent methylated reference for sequence defined by SEQ ID NO 5784 and/or SEQ ID NO 5728 and/or SEQ ID NO 5756;
[1879] 52. SEQ ID NO 5784 and/or SEQ ID NO 5728 and/or SEQ ID NO 5756, and wherein when the cancer index value is less than about 5.381 the individual is classified as not having CIN3 and/or cervical cancer or as having a low risk of CIN3 and/or cervical cancer development, and wherein the sensitivity of the assay is at least 70.00%, the specificity of the assay is at least 75.00%, and the AUC is 0.85, preferably wherein the cancer index value is the percent methylated reference for sequence defined by SEQ ID NO 5784 and/or SEQ ID NO 5728 and/or SEQ ID NO 5756;
[1880] 53. SEQ ID NO 5785 and/or SEQ ID NO 5729 and/or SEQ ID NO 5757, and wherein when the cancer index value is about 3.671 or more the individual is classified as having CIN3 and/or cervical cancer or as having a high risk of CIN3 and/or cervical cancer development, and wherein the sensitivity of the assay is at least 85.00%, the specificity of the assay is at least 75.00%, and the AUC is 0.84, preferably wherein the cancer index value is the percent methylated reference for sequence defined by SEQ ID NO 5785 and/or SEQ ID NO 5729 and/or SEQ ID NO 5757;
[1881] 54. SEQ ID NO 5785 and/or SEQ ID NO 5729 and/or SEQ ID NO 5757, and wherein when the cancer index value is less than about 3.671 the individual is classified as not having CIN3 and/or cervical cancer or as having a low risk of CIN3 and/or cervical cancer development, and wherein the sensitivity of the assay is at least 85.00%, the specificity of the assay is at least 75.00%, and the AUC is 0.84, preferably wherein the cancer index value is the percent methylated reference for sequence defined by SEQ ID NO 5785 and/or SEQ ID NO 5729 and/or SEQ ID NO 5757;
[1882] 55. SEQ ID NO 5786 and/or SEQ ID NO 5730 and/or SEQ ID NO 5758, and wherein when the cancer index value is about 0.652 or more the individual is classified as having CIN3 and/or cervical cancer or as having a high risk of CIN3 and/or cervical cancer development, and wherein the sensitivity of the assay is at least 55.00%, the specificity of the assay is at least 75.00%, and the AUC is 0.82, preferably wherein the cancer index value is the percent methylated reference for sequence defined by SEQ ID NO 5786 and/or SEQ ID NO 5730 and/or SEQ ID NO 5758;
[1883] 56. SEQ ID NO 5786 and/or SEQ ID NO 5730 and/or SEQ ID NO 5758, and wherein when the cancer index value is less than about 0.652 the individual is classified as not having CIN3 and/or cervical cancer or as having a low risk of CIN3 and/or cervical cancer development, and wherein the sensitivity of the assay is at least 55.00%, the specificity of the assay is at least 75.00%, and the AUC is 0.82, preferably wherein the cancer index value is the percent methylated reference for sequence defined by SEQ ID NO 5786 and/or SEQ ID NO 5730 and/or SEQ ID NO 5758
[1884] 57. SEQ ID NO 5759 and/or SEQ ID NO 5703 and/or SEQ ID NO 5731, and wherein when the cancer index value is about 0.003 or more the individual is classified as having CIN3 and/or cervical cancer or as having a high risk of CIN3 and/or cervical cancer development, and wherein the sensitivity of the assay is at least 86.00%, the specificity of the assay is at least 75.00%, and the AUC is 0.95, preferably wherein the cancer index value is the percent methylated reference for sequence defined by SEQ ID NO 5759 and/or SEQ ID NO 5703 and/or SEQ ID NO 5731;
[1885] 58. SEQ ID NO 5759 and/or SEQ ID NO 5703 and/or SEQ ID NO 5731, and wherein when the cancer index value is less than about 0.003 the individual is classified as not having CIN3 and/or cervical cancer or as having a low risk of CIN3 and/or cervical cancer development, and wherein the sensitivity of the assay is at least 86.00%, the specificity of the assay is at least 75.00%, and the AUC is 0.95, preferably wherein the cancer index value is the percent methylated reference for sequence defined by SEQ ID NO 5759 and/or SEQ ID NO 5703 and/or SEQ ID NO 5731;
[1886] 59. SEQ ID NO 5779 and/or SEQ ID NO 5723 and/or SEQ ID NO 5751, and wherein when the cancer index value is about 0.111 or more the individual is classified as having CIN3 and/or cervical cancer or as having a high risk of CIN3 and/or cervical cancer development, and wherein the sensitivity of the assay is at least 86.00%, the specificity of the assay is at least 75.00%, and the AUC is 0.90, preferably wherein the cancer index value is the percent methylated reference for sequence defined by SEQ ID NO 5779 and/or SEQ ID NO 5723 and/or SEQ ID NO 5751;
[1887] 60. SEQ ID NO 5779 and/or SEQ ID NO 5723 and/or SEQ ID NO 5751, and wherein when the cancer index value is less than about 0.111 the individual is classified as not having CIN3 and/or cervical cancer or as having a low risk of CIN3 and/or cervical cancer development, and wherein the sensitivity of the assay is at least 86.00%, the specificity of the assay is at least 75.00%, and the AUC is 0.90, preferably wherein the cancer index value is the percent methylated reference for sequence defined by SEQ ID NO 5779 and/or SEQ ID NO 5723 and/or SEQ ID NO 5751;
[1888] 61. SEQ ID NO 5769 and/or SEQ ID NO 5713 and/or SEQ ID NO 5741, and wherein when the cancer index value is about 0.022 or more the individual is classified as having CIN3 and/or cervical cancer or as having a high risk of CIN3 and/or cervical cancer development, and wherein the sensitivity of the assay is at least 75.00%, the specificity of the assay is at least 78.00%, and the AUC is 0.93, preferably wherein the cancer index value is the percent methylated reference for sequence defined by SEQ ID NO 5769 and/or SEQ ID NO 5713 and/or SEQ ID NO 5741;
[1889] 62. SEQ ID NO 5769 and/or SEQ ID NO 5713 and/or SEQ ID NO 5741, and wherein when the cancer index value is less than about 0.022 the individual is classified as not having CIN3 and/or cervical cancer or as having a low risk of CIN3 and/or cervical cancer development, and wherein the sensitivity of the assay is at least 75.00%, the specificity of the assay is at least 78.00%, and the AUC is 0.93, preferably wherein the cancer index value is the percent methylated reference for sequence defined by SEQ ID NO 5769 and/or SEQ ID NO 5713 and/or SEQ ID NO 5741;
[1890] 63. SEQ ID NO 5762 and/or SEQ ID NO 5706 and/or SEQ ID NO 5734, and wherein when the cancer index value is about 0.033 or more the individual is classified as having CIN3 and/or cervical cancer or as having a high risk of CIN3 and/or cervical cancer development, and wherein the sensitivity of the assay is at least 88.00%, the specificity of the assay is at least 75.00%, and the AUC is 0.93, preferably wherein the cancer index value is the percent methylated reference for sequence defined by SEQ ID NO 5762 and/or SEQ ID NO 5706 and/or SEQ ID NO 5734;
[1891] 64. SEQ ID NO 5762 and/or SEQ ID NO 5706 and/or SEQ ID NO 5734, and wherein when the cancer index value is less than about 0.033 the individual is classified as not having CIN3 and/or cervical cancer or as having a low risk of CIN3 and/or cervical cancer development, and wherein the sensitivity of the assay is at least 88.00%, the specificity of the assay is at least 75.00%, and the AUC is 0.93, preferably wherein the cancer index value is the percent methylated reference for sequence defined by SEQ ID NO 5762 and/or SEQ ID NO 5706 and/or SEQ ID NO 5734;
[1892] 65. SEQ ID NO 5761 and/or SEQ ID NO 5705 and/or SEQ ID NO 5733, and wherein when the cancer index value is about 0.001 or more the individual is classified as having CIN3 and/or cervical cancer or as having a high risk of CIN3 and/or cervical cancer development, and wherein the sensitivity of the assay is at least 84.00%, the specificity of the assay is at least 75.00%, and the AUC is 0.94, preferably wherein the cancer index value is the percent methylated reference for sequence defined by SEQ ID NO 5761 and/or SEQ ID NO 5705 and/or SEQ ID NO 5733;
[1893] 66. SEQ ID NO 5761 and/or SEQ ID NO 5705 and/or SEQ ID NO 5733, and wherein when the cancer index value is less than about 0.001 the individual is classified as not having CIN3 and/or cervical cancer or as having a low risk of CIN3 and/or cervical cancer development, and wherein the sensitivity of the assay is at least 84.00%, the specificity of the assay is at least 75.00%, and the AUC is 0.94, preferably wherein the cancer index value is the percent methylated reference for sequence defined by SEQ ID NO 5761 and/or SEQ ID NO 5705 and/or SEQ ID NO 5733;
[1894] 67. SEQ ID NO 5759 and/or SEQ ID NO 5703 and/or SEQ ID NO 5731, and wherein when the cancer index value is about 0.003 or more the individual is classified as having endometrial cancer or as having a high risk of endometrial cancer development, and wherein the sensitivity of the assay is at least 88.00%, the specificity of the assay is at least 75.00%, and the AUC is 0.95, preferably wherein the cancer index value is the percent methylated reference for sequence defined by SEQ ID NO 5759 and/or SEQ ID NO 5703 and/or SEQ ID NO 5731;
[1895] 68. SEQ ID NO 5759 and/or SEQ ID NO 5703 and/or SEQ ID NO 5731, and wherein when the cancer index value is less than about 0.003 the individual is classified as not having endometrial cancer or as having a low risk of endometrial cancer development, and wherein the sensitivity of the assay is at least 88.00%, the specificity of the assay is at least 75.00%, and the AUC is 0.95, preferably wherein the cancer index value is the percent methylated reference for sequence defined by SEQ ID NO 5759 and/or SEQ ID NO 5703 and/or SEQ ID NO 5731;
[1896] 69. SEQ ID NO 5779 and/or SEQ ID NO 5723 and/or SEQ ID NO 5751, and wherein when the cancer index value is about 0.111 or more the individual is classified as having endometrial cancer or as having a high risk of endometrial cancer development, and wherein the sensitivity of the assay is at least 85.00%, the specificity of the assay is at least 75.00%, and the AUC is 0.92, preferably wherein the cancer index value is the percent methylated reference for sequence defined by SEQ ID NO 5779 and/or SEQ ID NO 5723 and/or SEQ ID NO 5751;
[1897] 70. SEQ ID NO 5779 and/or SEQ ID NO 5723 and/or SEQ ID NO 5751, and wherein when the cancer index value is less than about 0.111 the individual is classified as not having endometrial cancer or as having a low risk of endometrial cancer development, and wherein the sensitivity of the assay is at least 85.00%, the specificity of the assay is at least 75.00%, and the AUC is 0.92, preferably wherein the cancer index value is the percent methylated reference for sequence defined by SEQ ID NO 5779 and/or SEQ ID NO 5723 and/or SEQ ID NO 5751;
[1898] 71. SEQ ID NO 5769 and/or SEQ ID NO 5713 and/or SEQ ID NO 5741, and wherein when the cancer index value is about 0.022 or more the individual is classified as having endometrial cancer or as having a high risk of endometrial cancer development, and wherein the sensitivity of the assay is at least 72.00%, the specificity of the assay is at least 78.00%, and the AUC is 0.91, preferably wherein the cancer index value is the percent methylated reference for sequence defined by SEQ ID NO 5769 and/or SEQ ID NO 5713 and/or SEQ ID NO 5741;
[1899] 72. SEQ ID NO 5769 and/or SEQ ID NO 5713 and/or SEQ ID NO 5741, and wherein when the cancer index value is less than about 0.022 the individual is classified as not having endometrial cancer or as having a low risk of endometrial cancer development, and wherein the sensitivity of the assay is at least 72.00%, the specificity of the assay is at least 78.00%, and the AUC is 0.91, preferably wherein the cancer index value is the percent methylated reference for sequence defined by SEQ ID NO 5769 and/or SEQ ID NO 5713 and/or SEQ ID NO 5741;
[1900] 73. SEQ ID NO 5762 and/or SEQ ID NO 5706 and/or SEQ ID NO 5734, and wherein when the cancer index value is about 0.033 or more the individual is classified as having endometrial cancer or as having a high risk of endometrial cancer development, and wherein the sensitivity of the assay is at least 72.00%, the specificity of the assay is at least 75.00%, and the AUC is 0.85, preferably wherein the cancer index value is the percent methylated reference for sequence defined by SEQ ID NO 5762 and/or SEQ ID NO 5706 and/or SEQ ID NO 5734;
[1901] 74. SEQ ID NO 5762 and/or SEQ ID NO 5706 and/or SEQ ID NO 5734, and wherein when the cancer index value is less than about 0.033 the individual is classified as not having endometrial cancer or as having a low risk of endometrial cancer development, and wherein the sensitivity of the assay is at least 72.00%, the specificity of the assay is at least 75.00%, and the AUC is 0.85, preferably wherein the cancer index value is the percent methylated reference for sequence defined by SEQ ID NO 5762 and/or SEQ ID NO 5706 and/or SEQ ID NO 5734;
[1902] 75. SEQ ID NO 5761 and/or SEQ ID NO 5705 and/or SEQ ID NO 5733, and wherein when the cancer index value is about 0.001 or more the individual is classified as having endometrial cancer or as having a high risk of endometrial cancer development, and wherein the sensitivity of the assay is at least 80.00%, the specificity of the assay is at least 75.00%, and the AUC is 0.89, preferably wherein the cancer index value is the percent methylated reference for sequence defined by SEQ ID NO 5761 and/or SEQ ID NO 5705 and/or SEQ ID NO 5733; and/or
[1903] 76. SEQ ID NO 5761 and/or SEQ ID NO 5705 and/or SEQ ID NO 5733, and wherein when the cancer index value is less than about 0.001 the individual is classified as not having endometrial cancer or as having a low risk of endometrial cancer development, and wherein the sensitivity of the assay is at least 80.00%, the specificity of the assay is at least 75.00%, and the AUC is 0.89, preferably wherein the cancer index value is the percent methylated reference for sequence defined by SEQ ID NO 5761 and/or SEQ ID NO 5705 and/or SEQ ID NO 5733.

[1904] In any of the described assays, the methylation status of the one or more CpGs in the panel is preferably determined by a percent methylated reference analysis, and the assay is for assessing the presence, absence or development of CIN3 and/or cancer, preferably the cancer is cervical cancer or endometrial cancer. Most preferably, the cancer is cervical cancer.

[1905] The ROC data set out in Tables 8, 10, 11 and 13 corresponding to each of SEQ ID NOs: 5703 to 5786 are derived by determining a cancer index value from a panel of CpGs, wherein the panel in each instance comprises all of the CpGs in the sequence(s) defined by the SEQ ID NO. The ROC data set out in Tables 8 and 13 relate to the performance of the assay of the invention in stratifying an individual as having or not having CIN3, or as having a high or low risk of developing CIN3. The ROC data set out in Table 11 relates to the performance of the assay of the invention in stratifying an individual as having or not having endometrial cancer, or as having a high or low risk of developing endometrial cancer.

TABLE 8

| | | | | | | SEQ ID NO: |
|---|---|---|---|---|---|---|
| Gene | auc | cutoff | specificity | sensitivity | Probe (5′ 6-FAM-3′ BHQ-1) | of probe |
| DPP6 | 0.96 | 1.146 | 0.75 | 0.95 | CGTGCGTCGCGCGCGTA | 5759 |
| NTM | 0.96 | 0.473 | 0.85 | 0.75 | TTTTTCGGGCGAGTATAGGAAGTGGGTG | 5760 |
| LHX8 | 0.95 | 1.546 | 0.75 | 0.95 | TTCGGGTTTAGGCGTCGTGACGG | 5761 |
| RALYL | 0.94 | 1.645 | 0.75 | 0.85 | AGCGGTAGTTCGCGGCGAGGTT | 5762 |
| FUT9 | 0.94 | 2.824 | 0.75 | 0.9 | ATCGAGGTAGCGATAGCGGCGGG | 5763 |
| LINC00403 | 0.94 | 2.968 | 0.75 | 0.85 | TTGGTCGTGTCGTGGCGCG | 5764 |
| CLVS2 | 0.93 | 0.184 | 0.8 | 0.75 | CGGTTGTTGCGCGGCGTTG | 5765 |
| KCNIP4 | 0.93 | 0.716 | 0.75 | 0.9 | CGGGCGGTTCGAGTGCGG | 5766 |
| NET01 | 0.93 | 3.482 | 0.75 | 0.85 | ATTCGGCGACGGTTGATCGCG | 5767 |
| CLEC14A | 0.92 | 3.818 | 0.75 | 0.9 | TGTAGTTGGAAGGGCGCGCGATAG | 5768 |
| GSX1 | 0.92 | 0.295 | 0.75 | 0.8 | CGATCGCGCGTCGG | 5769 |
| ZNF536 | 0.92 | 1.725 | 0.75 | 0.75 | CGCGGTGACGGCGTTTTTAATTGA | 5770 |
| PDEIC | 0.92 | 3.258 | 0.75 | 0.9 | TTATCGTAGTTTGAGGCGTTATCGGTTGTTTTC | 5771 |
| MDGA | 0.92 | 4.731 | 0.75 | 0.85 | CGAGGCGAAGTGTTTTTTAGGGAAGCG | 5772 |
| MHC | 0.92 | 1.427 | 0.75 | 0.8 | TTGGTTAGCGTGCGATATAGGCGCG | 5773 |
| NID2 | 0.92 | 4.511 | 0.75 | 0.85 | AATTTCGTAGCGGCGAGTGCGGT | 5774 |
| ZIC4 | 0.92 | 6.894 | 0.75 | 0.9 | CGTTCGTCGTCGTTTAGTTTTGGTTACGATT | 5775 |
| RCN1 | 0.92 | 3.934 | 0.75 | 0.85 | CGTTTTTCGTCGACGTTATTTGTTTTGCG | 5776 |
| RYR2 | 0.92 | 4.153 | 0.75 | 0.85 | TCGGAGGAGCGGGTTGCGG | 5777 |
| MSC | 0.91 | 0.468 | 0.75 | 0.85 | TTCGCGGCGTAGAGCGTAGTTACGTT | 5778 |
| LINC00403 | 0.9 | 2.226 | 0.75 | 0.9 | TTGTCGGTGTTCGTTCGAGAGTTTTATTAGCG | 5779 |
| RBFOX | 0.9 | 6.942 | 0.75 | 0.85 | TCGGTGGGATTGGTTGCGTTGTTTT | 5780 |
| GALR1 | 0.9 | 1.955 | 0.75 | 0.8 | TGTTCGGTTTGATTTTCGCGTTGGG | 5781 |
| RNF291 | 0.88 | 5.005 | 0.75 | 0.75 | TTTTGGCGTGGATTCGATTGTGTCG | 5782 |
| REG39 | 0.86 | 5.315 | 0.75 | 0.8 | TAGTGGTTTTCGTGGGCGGTTTCGT | 5783 |
| RP4 | 0.85 | 5.381 | 0.75 | 0.7 | TTTTCGGAGCGTATTCGGTATTTTCGTTGTTT | 5784 |
| ELAVL4 | 0.84 | 3.671 | 0.75 | 0.85 | CGAGAGCGGTGAGATTTTGCGGA | 5785 |
| SERTM1 | 0.82 | 0.652 | 0.75 | 0.55 | CGGTAGGTTTTTTGCGTTAGCGGTGG | 5786 |

TABLE 13

| | | | | | | | SEQ ID | | | | | |
|---|---|---|---|---|---|---|---|---|---|---|---|---|
| | | | | | | | NO of | | | | | |
| | | | | | | | probe | | | | | |
| | | | | | SEQ ID | SEQ ID | (5′ 6- | | | | | |
| | | | | | NO of | NO of | FAM- | | | | | |
| | | | speci- | sensi- | forward | reverse | 3′ BHQ- | | | Amplicon | Amplicon | DNA |
| gene_name | auc | cutoff | ficity | tivity | primer | primer | 1) | ML.Design.Region | Chrm | location | size | strand |
| CLEC14A_i | 0.92 | 3.818 | 0.75 | 0.9 | 5712 | 5740 | 5768 | chr14:38724342-38725008 | 14 | chr14:38724596- | 83 | pos |
| | | | | | | | | | | 38724678 | | |
| CLVS2_ii | 0.93 | 0.184 | 0.8 | 0.75 | 5709 | 5737 | 5765 | chr6:123317188-123317787 | 6 | chr6:123317440- | 95 | neg |
| | | | | | | | | | | 123317534 | | |
| DPP6_i | 0.95 | 0.003 | 0.75 | 0.86 | 5703 | 5731 | 5759 | chr7:153583701-153584375 | 7 | chr7:153584008- | 72 | pos |
| | | | | | | | | | | 153584079 | | |
| ELAVL4_i | 0.84 | 3.671 | 0.75 | 0.85 | 5729 | 5757 | 5785 | chr1:50513450-50514049 | 1 | chr1:50513718- | 71 | pos |
| | | | | | | | | | | 50513788 | | |
| FUT9_ii | 0.94 | 2.824 | 0.75 | 0.9 | 5707 | 5735 | 5763 | chr6:96463603-96464202 | 6 | chr6:96463902- | 103 | neg |
| | | | | | | | | | | 96464004 | | |
| GALR1_i | 0.9 | 1.955 | 0.75 | 0.8 | 5725 | 5753 | 5781 | chr18:74962373-74962972 | 18 | chr18:74962595- | 90 | pos |
| | | | | | | | | | | 74962684 | | |
| GSXiii | 0.93 | 0.022 | 0.78 | 0.75 | 5713 | 5741 | 5769 | chr13:28366477-28367151 | 13 | chr13:28366785- | 82 | pos |
| | | | | | | | | | | 28366866 | | |
| KCNIP4_i | 0.93 | 0.716 | 0.75 | 0.9 | 5710 | 5738 | 5766 | chr4:21950268-21950867 | 4 | chr4:21950535- | 62 | pos |
| | | | | | | | | | | 21950596 | | |
| LHX8_i | 0.94 | 0.001 | 0.75 | 0.84 | 5705 | 5733 | 5761 | chr1:75601868-75602467 | 1 | chr1:75602107- | 79 | pos |
| | | | | | | | | | | 75602185 | | |
| LINC00403_i | 0.9 | 0.111 | 0.75 | 0.86 | 5723 | 5751 | 5779 | chr13:112711710-112712309 | 13 | chr13:112711967- | 86 | pos |
| | | | | | | | | | | 112712052 | | |
| LINC00403_iv | 0.94 | 2.968 | 0.75 | 0.85 | 5708 | 5736 | 5764 | chr13:112716945-112717544 | 13 | chr13:112717233- | 85 | neg |
| | | | | | | | | | | 112717317 | | |
| MDGA_I | 0.92 | 4.731 | 0.75 | 0.85 | 5716 | 5744 | 5772 | chr14:48143898-48144497 | 14 | chr14:48144084- | 115 | pos |
| | | | | | | | | | | 48144198 | | |
| MHC_ii | 0.92 | 1.427 | 0.75 | 0.8 | 5717 | 5745 | 5773 | chr6:29521121-29521720 | 6 | chr6:29521375- | 85 | neg |
| | | | | | | | | | | 29521459 | | |
| MSC_ii | 0.91 | 0.468 | 0.75 | 0.85 | 5722 | 5750 | 5778 | chr8:72755932-72756681 | 8 | chr8:72756267- | 82 | neg |
| | | | | | | | | | | 72756348 | | |
| NET01_i | 0.93 | 3.482 | 0.75 | 0.85 | 5711 | 5739 | 5767 | chr18:70533999-70534598 | 18 | chr18:70534272- | 75 | pos |
| | | | | | | | | | | 70534346 | | |
| NID2_i | 0.92 | 4.511 | 0.75 | 0.85 | 5718 | 5746 | 5774 | chr14:52535876-52536475 | 14 | chr14:52536129- | 70 | pos |
| | | | | | | | | | | 52536198 | | |
| NTM_ii | 0.96 | 0.473 | 0.85 | 0.75 | 5704 | 5732 | 5760 | chr11:131780961-131781560 | 11 | chr11:131781252- | 103 | neg |
| | | | | | | | | | | 131781354 | | |
| PDEIC_ii | 0.92 | 3.258 | 0.75 | 0.9 | 5715 | 5743 | 5771 | chr7:32467358-32467957 | 7 | chr7:32467624- | 81 | neg |
| | | | | | | | | | | 32467704 | | |
| RALYL_ii | 0.93 | 0.033 | 0.75 | 0.88 | 5706 | 5734 | 5762 | chr8:85095225-85095824 | 8 | chr8:85095492- | 89 | neg |
| | | | | | | | | | | 85095580 | | |
| RBFOX_i | 0.9 | 6.942 | 0.75 | 0.85 | 5724 | 5752 | 5780 | chr16:6069102-6069701 | 16 | chr16:6069328- | 76 | pos |
| | | | | | | | | | | 6069403 | | |
| RCN1_i | 0.92 | 3.934 | 0.75 | 0.85 | 5720 | 5748 | 5776 | chr11:32008662-32009261 | 11 | chr11:32008959- | 84 | pos |
| | | | | | | | | | | 32009042 | | |
| REG39_i | 0.86 | 5.315 | 0.75 | 0.8 | 5727 | 5755 | 5783 | chr19:22444294-22444893 | 19 | chr19:22444593- | 71 | pos |
| | | | | | | | | | | 22444663 | | |
| RNF291_ii | 0.88 | 5.005 | 0.75 | 0.75 | 5726 | 5754 | 5782 | chr13:79170004-79170603 | 13 | chr13:79170284- | 84 | neg |
| | | | | | | | | | | 79170367 | | |
| RP4_ii | 0.85 | 5.381 | 0.75 | 0.7 | 5728 | 5756 | 5784 | chr12:126675749-126676348 | 12 | chr12:126676038- | 102 | neg |
| | | | | | | | | | | 126676139 | | |
| RYR2_i | 0.92 | 4.153 | 0.75 | 0.85 | 5721 | 5749 | 5777 | chr1:237205085-237205684 | 1 | chr1:237205344- | 67 | pos |
| | | | | | | | | | | 237205410 | | |
| SERTM1_ii | 0.82 | 0.652 | 0.75 | 0.55 | 5730 | 5758 | 5786 | chr13:37247945-37248544 | 13 | chr13:37248238- | 84 | neg |
| | | | | | | | | | | 37248321 | | |
| ZIC4 | 0.92 | 6.894 | 0.75 | 0.9 | 5719 | 5747 | 5775 | chr3:147108544-147109143 | 3 | chr3:147108796- | 89 | neg |
| | | | | | | | | | | 147108884 | | |
| ZNF536_ii | 0.92 | 1.725 | 0.75 | 0.75 | 5714 | 5742 | 5770 | chr19:30865857-30866531 | 19 | chr19:30866195- | 85 | neg |
| | | | | | | | | | | 30866279 | | |

TABLE 11

| | | | | | SEQ ID NO | SEQ ID NO | SEQ ID NO |
|---|---|---|---|---|---|---|---|
| | | | | | of forward | of reverse | of probe |
| gene_name | auc | cutoff | specificity | sensitivity | primer | primer | (5′ 6-FAM-3′ BHQ-1) |
| DPP6_i | 0.95 | 0.003 | 0.75 | 0.88 | 5703 | 5731 | 5759 |
| LINC00403_i | 0.92 | 0.111 | 0.75 | 0.85 | 5723 | 5751 | 5779 |
| GSXiii | 0.91 | 0.022 | 0.78 | 0.72 | 5713 | 5741 | 5769 |
| RALYL_ii | 0.85 | 0.033 | 0.75 | 0.72 | 5706 | 5734 | 5762 |
| LHX8_i | 0.89 | 0.001 | 0.75 | 0.8 | 5705 | 5733 | 5761 |

### Relationship Between Cancer Index Value and Determining Methylation Status of CpGs

[1906] In view of the observations described herein (see Examples), the inventors derived a cancer index based on an analysis of methylation status (DNAme; as described above) for use in assays for assessing the presence or development of cancer in an individual.

[1907] As explained herein, the described assays particularly relate to the assessment of assessing the presence, absence or development of cervical cancer and/or endometrial cancer, particularly cervical cancer.

[1908] Any of the assays described herein involve deriving a cancer index value based on the methylation of status of a panel of one or more CpGs assayed in a sample provided from an individual, as described and defined herein.

[1909] The cancer index value may be derived by any suitable means.

[1910] The inventors have identified specific CpGs, as described and defined herein, which may be used to form a panel of CpGs whose methylation status is determined in order to establish cancer index values in accordance with the assays described and defined herein. Using these panels the inventors have demonstrated that it is possible to derive a cancer index value which correlates with and is indicative of normal tissue, i.e. tissue which is CIN3 and/or cancer negative, in particular cervical and/or endometrial tissue which is cancer negative. Accordingly, cancer can be assessed to be absent in the individual. Using these panels the inventors have demonstrated that it is possible to derive a cancer index value which correlates with and is indicative of CIN3 and/or cancer tissue, i.e. tissue which is CIN3 and/or cancer positive, in particular cervical and/or endometrial tissue which is cancer negative. Accordingly, CIN3 and/or cancer can be assessed to be present in the individual. As explained herein, the inventors have shown that using panels of the CpGs that have been identified. Accordingly, CIN3 and/or cancer can be assessed to be present in the individual. As explained herein, the inventors have shown that using panels of the CpGs that have been identified it can be shown that the DNA methylation profile of normal cells, particularly from epithelial cells, particularly derived from the cervix, vaginal, the buccal area, blood or urine, or from a cervical liquid-based cytology sample, and more preferably from a cervical smear sample, as indicated by the cancer index value, is dynamic and subject to change on a continuum from indicating CIN3 and/or cancer negative to CIN3 and/or cancer positive tissue. In particular, the cancer index value described herein acts as a surrogate for indicating whether the cervical and/or endometrial tissue of an individual is cancer negative or cancer positive to a high degree of statistical accuracy. As such, using panels of the CpGs that have been identified it is possible to establish a cancer index value scale that can be used to assess the presence, absence or development of CIN3 and/or cancer, particularly cervical or endometrial cancer, most preferably cervical cancer, in an individual.

[1911] As described herein, the inventors have used certain methods for determining the methylation status of specific CpGs in the population of DNA molecules in the sample. For example, in one method a percent methylated reference (PMR) value of a CpG may be determined. In another method the methylation β-values of a CpG may be determined. Different mechanisms may be employed to determine specific values depending on the circumstances, such as PCR-based mechanisms or array-based mechanisms.

[1912] As will be apparent to a skilled person, in the assays of the invention the steps of determining the methylation status of specific CpGs in the population of DNA molecules in the sample are not limited to any one specific methodology. As the skilled person will appreciate, because the cancer index value is based on the methylation status of CpGs, and since the methylation status of CpGs can be represented by values which may be specific to a specific methodology, e.g. percent methylated reference (PMR) value or methylation β-value, then the range of cancer index values which define cancer negative and cancer positive samples may be dependent upon the methodology used to determine the methylation status of CpGs. Nevertheless, a user may readily reproduce and implement the assays of the invention using any suitable methodology for determining the methylation status of CpGs, provided that the same methodology is used consistently. Moreover, the user can readily establish, de novo, cancer index values which define cancer negative and cancer positive samples by determining the methylation status of CpGs in panels constituting the specific CpGs disclosed herein from known cancer negative and cancer positive patient samples. Once such cancer index values are established using the CpGs identified herein, a user may use these values as a basis for assessing the presence, absence or development of CIN3 and/or cancer, particularly cervical or endometrial cancer, most preferably cervical cancer, in any test individual whose cancer status is to be determined. Accordingly, cancer index values according to the present invention are not limited to specific methods of determination of methylation status of CpGs. On the contrary, the skilled person will appreciate that cancer index values can be established which reflect the intrinsic capabilities of the CpGs identified herein to correlate methylation status with CIN3 and/or cancer disease status.

[1913] Accordingly, the cancer index value may be derived by assessing the methylation status of the one or more CpGs in the panel in a sample provided from an individual by any suitable means.

[1914] The step of determining the methylation status of each CpG in the panel of one or more CpGs may be achieved by determining a percent methylated reference (PMR) value of each one of the one or more CpGs. The step of determining the methylation status of each CpG in the panel of one or more CpGs may be achieved by determining the methylation β-value of each one of the one or more CpGs.

[1915] In any of the assays described herein, the methylation status of the CpGs may be determined by any suitable means. For example, in any of the assays described herein the step of determining the methylation status of each CpG in the panel of one or more CpGs may comprise:
[1916] a. performing a sequencing step to determine the sequence of each CpG;
[1917] b. hybridising DNA to an array comprising probes capable of discriminating between methylated and non-methylated forms of the CpGs and applying a detection system to the array so as to determine the methylation status of each CpG; and/or
[1918] c. performing a PCR step using methylation-specific primers, wherein the methylation status of the CpG is determined by the presence or absence of a PCR product.

[1919] The step of determining the methylation status of each CpG in the panel of one or more CpGs may comprise a conversion step in order to distinguish methylated CpG dinucleotides relative to non-methylated CpG dinucleotides. The conversion step may comprise e.g. bisulfate conversion or TAPS (TET-assisted pyridine borane sequencing) conversion of the DNA in a sample that is to be applied to any one or more of a. to c. above. TAPS may particularly involve the steps of oxidising 5-methylcytosine bases (5mC) to 5-carboxylcytosine bases (5caC), preferably by ten-eleven translocation (TET), and/or oxidising 5-hydroxymethylcytosine bases (5hmC) to 5-carboxylcytosine bases (5caC), preferably by ten-eleven translocation (TET); followed by reducing 5-carboxylcytosine bases (5caC) to dihydrouracil bases (DHU), optionally with pyridine borane.

[1920] The step of determining the methylation status of each CpG in the panel of one or more CpGs may additionally, or alternatively, comprise the use of TempO-seq (templated Olig-sequencing). The oligonucleotides in the context of TempO-seq may or may not be designed such that they hybridise with methylated CpG dinucleotides following a prior conversion as described herein.

[1921] The step of determining the methylation status of each CpG in the panel of one or more CpGs may comprise the contacting the DNA in the sample with one or more methylation sensitive restriction endonucleases that cleave methylated and/or unmethylated forms of their restriction sites, and preferably the contacting of the DNA is prior to performing any one of a. to c. above. In assays of the invention wherein methylation sensitive restriction enzymes are used, one or more control reactions are performed. Preferably, the one or more control reactions involve interrogation of known loci that contain (i) no restriction endonuclease sites; (ii) a restriction site that is methylated; (iii) a restriction site that is unmethylated.

[1922] Using any of the methods for determining the methylation status of each CpG in the panel of one or more CpGs, the proportion of methylated and unmethylated CpGs at any given locus may be determined, thereby enabling generation of a cancer index value.

[1923] Preferably, the step of determining in the population of DNA molecules in the sample the methylation status of a panel of one or more CpGs further comprises determining a β value of each CpG. Deriving the cancer index value may involve providing a methylation β-value data set comprising the methylation β-values for each CpG in the panel of one or more CpGs.

### Assessment of Methylation Status of CpGs

[1924] Methylation of DNA is a recognised form of epigenetic modification which has the capability of altering the expression of genes and other elements such as microRNAs. In cancer development and progression, methylation may have the effect of e.g. silencing tumor suppressor genes and/or increasing the expression of oncogenes. Other forms of dysregulation may occur as a result of methylation. Methylation of DNA occurs at discrete loci which are predominately dinucleotides consisting of a CpG motif, but may also occur at CHH motifs (where H is A, C, or T). During methylation, a methyl group is added to the fifth carbon of cytosine bases to create methylcytosine.

[1925] Methylation can occur throughout the genome and is not limited to regions with respect to an expressed sequence such as a gene. Methylation typically, but not always, occurs in a promoter or other regulatory region of an expressed sequence such as enhancer elements. Most typically, the methylation status of CpGs is clustered in CpG islands, for example CpG islands present in the regulatory regions of genes, especially in their promoter regions.

[1926] Typically, an assessment of DNA methylation status involves analysing the presence or absence of methyl groups in DNA, for example methyl groups on the 5 position of one or more cytosine nucleotides. Preferably, the methylation status of one or more cytosine nucleotides present as a CpG dinucleotide (where C stands for Cytosine, G for Guanine and p for the phosphate group linking the two) is assessed.

[1927] A variety of techniques are available for the identification and assessment of CpG methylation status, as will be outlined briefly below. The assays described herein encompass any suitable technique for the determination of CpG methylation status.

[1928] Methyl groups are lost from a starting DNA molecule during conventional in vitro handling steps such as PCR. To avoid this, techniques for the detection of methyl groups commonly involve the preliminary treatment of DNA prior to subsequent processing, in a way that preserves the methylation status information of the original DNA molecule. Such preliminary techniques involve three main categories of processing, i.e. bisulphite modification, restriction enzyme digestion and affinity-based analysis. Products of these techniques can then be coupled with sequencing or array-based platforms for subsequent identification or qualitative assessment of CpG methylation status.

[1929] Techniques involving bisulphite modification of DNA have become the most common assays for detection and assessment of methylation status of CpG dinucleotides. Treatment of DNA with bisulphite, e.g. sodium bisulphite, converts cytosine bases to uracil bases, but has no effect on 5-methylcytosines. Thus, the presence of a cytosine in bisulphite-treated DNA is indicative of the presence of a cytosine base which was previously methylated in the starting DNA molecule. Such cytosine bases can be detected by a variety of techniques. For example, primers specific for unmethylated versus methylated DNA can be generated and used for PCR-based identification of methylated CpG dinucleotides. DNA may be amplified, either before or after bisulphite conversion. A separation/capture step may be performed, e.g. using binding molecules such as complementary oligonucleotide sequences. Standard and next-generation DNA sequencing protocols can also be used.

[1930] In other approaches, methylation-sensitive enzymes can be employed which digest or cut only in the presence of methylated DNA. Analysis of resulting fragments is commonly carried out using microarrays.

[1931] Affinity-based techniques exploit binding interactions to capture fragments of methylated DNA for the purposes of enrichment. Binding molecules such as anti-5-methylcytosine antibodies are commonly employed prior to subsequent processing steps such as PCR and sequencing.

[1932] Olkhov-Mitsel and Bapat (2012) provide a comprehensive review of techniques available for the identification and assessment of biomarkers involving methylcytosine.

[1933] For the purposes of assessing the methylation status of the CpG-based biomarkers characterised and described herein, any suitable assay can be employed.

[1934] Assays described herein may comprise determining methylation status of CpGs by bisulphite converting the DNA. Preferred assays involve bisulphite treatment of DNA, including amplification of the identified CpG loci for methylation specific PCR and/or sequencing and/or assessment of the methylation status of target loci using methylation-discriminatory microarrays.

[1935] Amplification of CpG loci can be achieved by a variety of approaches. Preferably, CpG loci are amplified using PCR. A variety of PCR-based approaches may be used. For example, methylation-specific primers may be hybridized to DNA containing the CpG sequence of interest. Such primers may be designed to anneal to a sequence derived from either a methylated or non-methylated CpG locus. Following annealing, a PCR reaction is performed and the presence of a subsequent PCR product indicates the presence of an annealed CpG of identifiable sequence. In such assays, DNA is bisulphite converted prior to amplification. Such techniques are commonly referred to as methylation specific PCR (MSP).

[1936] In other techniques, PCR primers may anneal to the CpG sequence of interest independently of the methylation status, and further processing steps may be used to determine the status of the CpG. Assays are designed so that the CpG site(s) are located between primer annealing sites. This assay scheme is used in techniques such as bisulphite genomic sequencing, COBRA, Ms-SNuPE. In such assay, DNA can be bisulphite converted before or after amplification.

[1937] Small-scale PCR approaches may be used. Such approaches commonly involve mass partitioning of samples (e.g. digital PCR). These techniques offer robust accuracy and sensitivity in the context of a highly miniaturised system (pico-liter sized droplets), ideal for the subsequent handling of small quantities of DNA obtainable from the potentially small volume of cellular material present in biological samples, particularly urine samples. A variety of such small-scale PCR techniques are widely available. For example, microdroplet-based PCR instruments are available from a variety of suppliers, including RainDance Technologies, Inc. (Billerica, MA; http://raindancetech.com/) and Bio-Rad, Inc. (http://www.bio-rad.com/). Microarray platforms may also be used to carry out small-scale PCR. Such platforms may include microfluidic network-based arrays e.g. available from Fluidigm Corp. (www.fluidigm.com).

[1938] Following amplification of CpG loci, amplified PCR products may be coupled to subsequent analytical platforms in order to determine the methylation status of the CpGs of interest. For example, the PCR products may be directly sequenced to determine the presence or absence of a methylcytosine at the target CpG or analysed by array-based techniques.

[1939] Any suitable sequencing techniques may be employed to determine the sequence of target DNA. In the assays of the present invention the use of high-throughput, so-called “second generation”, “third generation” and “next generation” techniques to sequence bisulphite-treated DNA can be used.

[1940] In second generation techniques, large numbers of DNA molecules are sequenced in parallel. Typically, tens of thousands of molecules are anchored to a given location at high density and sequences are determined in a process dependent upon DNA synthesis. Reactions generally consist of successive reagent delivery and washing steps, e.g. to allow the incorporation of reversible labelled terminator bases, and scanning steps to determine the order of base incorporation. Array-based systems of this type are available commercially e.g. from Illumina, Inc. (San Diego, CA; http://www.illumina.com/).

[1941] Third generation techniques are typically defined by the absence of a requirement to halt the sequencing process between detection steps and can therefore be viewed as real-time systems. For example, the base-specific release of hydrogen ions, which occurs during the incorporation process, can be detected in the context of microwell systems (e.g. see the Ion Torrent system available from Life Technologies; http://www.lifetechnologies.com/). Similarly, in pyrosequencing the base-specific release of pyrophosphate (PPi) is detected and analysed. In nanopore technologies, DNA molecules are passed through or positioned next to nanopores, and the identities of individual bases are determined following movement of the DNA molecule relative to the nanopore. Systems of this type are available commercially e.g. from Oxford Nanopore (https://www.nanoporetech.com/). In an alternative assay, a DNA polymerase enzyme is confined in a “zero-mode waveguide” and the identity of incorporated bases are determined with florescence detection of gamma-labeled phosphonucleotides (see e.g. Pacific Biosciences; http://www.pacificbiosciences.com/).

[1942] In other assays sequencing steps may be omitted. For example, amplified PCR products may be applied directly to hybridization arrays based on the principle of the annealing of two complementary nucleic acid strands to form a double-stranded molecule. Hybridization arrays may be designed to include probes which are able to hybridize to amplification products of a CpG and allow discrimination between methylated and non-methylated loci. For example, probes may be designed which are able to selectively hybridize to an CpG locus containing thymine, indicating the generation of uracil following bisulphite conversion of an unmethylated cytosine in the starting template DNA. Conversely, probes may be designed which are able to selectively hybridize to a CpG locus containing cytosine, indicating the absence of uracil conversion following bisulphite treatment. This corresponds with a methylated CpG locus in the starting template DNA.

[1943] Following the application of a suitable detection system to the array, computer-based analytical techniques can be used to determine the methylation status of a CpG. Detection systems may include, e.g. the addition of fluorescent molecules following a methylation status-specific probe extension reaction. Such techniques allow CpG status determination without the specific need for the sequencing of CpG amplification products. Such array-based discriminatory probes may be termed methylation-specific probes.

[1944] Any suitable methylation-discriminatory microarrays may be employed to assess the methylation status of the CpGs described herein. One particular methylation-discriminatory microarray system is provided by Illumina, Inc. (San Diego, CA; http://www.illumina.com/). In particular, the Infinium MethylationEPIC BeadChip array and the Infinium HumanMethylation450 BeadChip array systems may be used to assess the methylation status of CpGs for predicting cancer development as described herein. Such a system exploits the chemical modifications made to DNA following bisulphite treatment of the starting DNA molecule. Briefly, the array comprises beads to which are coupled oligonucleotide probes specific for DNA sequences corresponding to the unmethylated form of a CpG, as well as separate beads to which are coupled oligonucleotide probes specific for DNA sequences corresponding to the methylated form of an CpG. Candidate DNA molecules are applied to the array and selectively hybridize, under appropriate conditions, to the oligonucleotide probe corresponding to the relevant epigenetic form. Thus, a DNA molecule derived from a CpG which was methylated in the corresponding genomic DNA will selectively attach to the bead comprising the methylation-specific oligonucleotide probe, but will fail to attach to the bead comprising the non-methylation-specific oligonucleotide probe. Single-base extension of only the hybridized probes incorporates a labeled ddNTP, which is subsequently stained with a fluorescence reagent and imaged. The methylation status of the CpG is determined by calculating the ratio of the fluorescent signal derived from the methylated and unmethylated sites.

[1945] Infinium HumanMethylation450 BeadChip array systems can be used to interrogate CpGs in the assays described herein. Alternative or customised arrays could, however, be employed to interrogate the cancer-specific CpG biomarkers defined herein, provided that they comprise means for interrogating all CpG for a given assay, as defined herein.

[1946] Techniques involving combinations of the above-described assays may also be used. For example, DNA containing CpG sequences of interest may be hybridized to microarrays and then subjected to DNA sequencing to determine the status of the CpG as described above.

[1947] In the assays described above, sequences corresponding to CpG loci may also be subjected to an enrichment process if desired. DNA containing CpG sequences of interest may be captured by binding molecules such as oligonucleotide probes complementary to the CpG target sequence of interest. Sequences corresponding to CpG loci may be captured before or after bisulphite conversion or before or after amplification. Probes may be designed to be complementary to bisulphite converted DNA. Captured DNA may then be subjected to further processing steps to determine the status of the CpG, such as DNA sequencing steps.

[1948] Capture/separation steps may be custom designed. Alternatively a variety of such techniques are available commercially, e.g. the SureSelect target enrichment system available from Agilent Technologies (http://www.agilent.com/home). In this system biotinylated “bait” or “probe” sequences (e.g. RNA) complementary to the DNA containing CpG sequences of interest are hybridized to sample nucleic acids. Streptavidin-coated magnetic beads are then used to capture sequences of interest hybridized to bait sequences. Unbound fractions are discarded. Bait sequences are then removed (e.g. by digestion of RNA) thus providing an enriched pool of CpG target sequences separated from non-CpG sequences. Template DNA may be subjected to bisulphite conversion and target loci amplified by small-scale PCR such as microdroplet PCR using primers which are independent of the methylation status of the CpG. Following amplification, samples may be subjected to a capture step to enrich for PCR products containing the target CpG, e.g. captured and purified using magnetic beads, as described above. Following capture, a standard PCR reaction is carried out to incorporate DNA sequencing barcodes into CpG-containing amplicons. PCR products are again purified and then subjected to DNA sequencing and analysis to determine the presence or absence of a methylcytosine at the target genomic CpG.

[1949] CpG biomarker loci defined herein by SEQ ID NOs 1 to 5000 correspond to Illumina® identifiers (IlmnID) known in the art. These CpG loci identifiers refer to individual CpG sites used in the commercially available Illumina® Infinium Methylation EPIC BeadChip kit and Illumina® Infinium Human Methylation450 BeadChip kit. The identity of each CpG site represented by each CpG loci identifier is publicly available from the Illumina, Inc. website under reference to the CpG sites used in the Infinium Methylation EPIC BeadChip kit and the Infinium Human Methylation450 BeadChip kit.

[1950] To complement evolving public databases to provide accurate CpG loci identifiers and strand orientation, Illumina® has developed a method to consistently designate CpG loci based on the actual or contextual sequence of each individual CpG locus. To unambiguously refer to CpG loci in any species, Illumina® has developed a consistent and deterministic CpG loci database to ensure uniformity in the reporting of methylation data. The Illumina® method takes advantage of sequences flanking a CpG locus to generate a unique CpG locus cluster ID. This number is based on sequence information only and is unaffected by genome version. Illumina's standardized nomenclature also parallels the TOP/BOT strand nomenclature (which indicates the strand orientation) commonly used for single nucleotide polymorphism (SNP) designation.

[1951] Illumina® Identifiers for the Infinium MethylationEPIC BeadChip and Infinium Human Methylation450 BeadChip system are also available from public repositories such as Gene Expression Omnibus (GEO) (http://www.ncbi.nlm.nih.gov/geo/).

[1952] By assessing the methylation status of a CpG it is meant that a determination is made as to whether a given CpG is methylated or unmethylated. In addition, it is meant that a determination is made as to the degree to which a given CpG site is methylated across a population of CpG loci in a sample.

[1953] CpG methylation status may be measured indirectly using a detection system such as fluorescence. A methylation-discriminatory microarray may be used. When calculating the degree of methylation of a given CpG, the Illumina® definition of beta-values may be used. The Illumina® methylation beta-value of a specific CpG site is calculated from the intensity of the methylated (M) and unmethylated (U) alleles, as the ratio of fluorescent signals β=Max(M,0)/[Max(M,0)+Max(U,0)+100]. On this scale, 0<β<1, β values of 1 or close to 1 indicate 100% methylation whereas values of 0 or close to 0 indicate 0% methylation.

[1954] The methylation status of any one or more CpGs of the CpGs defined by SEQ ID NOs: 1 to 5000 or identified in SEQ ID NOs: 5001 to 5418 may be assessed by any suitable technique. As explained in more detail in the Examples below, one particular exemplary technique which the inventors have used is a methylation discriminatory array, such as an Illumina InfiniumMethylation EPIC BeadChip. These assays utilise probes directed to methylated and unmethylated CpGs at a given locus.

[1955] Another exemplary technique which the inventors have used to determine the methylation status of any one or more CpGs is a fluorescence-based PCR technique referred to as MethyLight. These assays utilise forward and reverse PCR primers specific for sequences encompassing any one or more of the 5000 CpGs defined according to SEQ ID NOS: 1 to 5000, or identified in SEQ ID NOs: 5001 to 5418 and 5703 to 5786. The methylation status of one or more of the CpGs defined by SEQ ID NOs: 1 to 5000, or identified in SEQ ID NOs: 5001 to 5418 and 5703 to 5786 may therefore be determined by MethyLight analysis. The detectable probes are typically designed such that they hybridise only to methylated forms of the one or more CpGs to be assayed in view of the bisulfite conversion step within a typical MethyLight protocol.

### Bioinformatic Tools and Statistical Metrics for CpG-Based Assays

[1956] Software programs which aid in the in silico analysis of bisulphite converted DNA sequences and in primer design for the purposes of methylation-specific analyses are generally available and have been described previously.

[1957] In risk models for predicting cancer, a receiver-operating-characteristic (ROC) curve analysis often used, in which the area under the curve (AUC) is assessed. Each point on the ROC curve shows the effect of a rule for turning a risk/likelihood estimate into a prediction of the presence, absence or development of CIN3 and/or cancer, particularly cervical or endometrial cancer, most preferably cervical cancer, in an individual. The AUC measures how well the model discriminates between case subjects and control subjects. An ROC curve that corresponds to a random classification of case subjects and control subjects is a straight line with an AUC of 50%. An ROC curve that corresponds to perfect classification has an AUC of 100%.

[1958] In any of the methods described herein, the 95% confidence interval for the ROC AUC may be between 0.60 and 1.

[1959] In any of the methods described herein, the interval may be defined as a range having as an upper limit any number between 0.60 and 1. The upper limit number may be 0.60, 0.61, 0.62, 0.63, 0.64, 0.65, 0.66, 0.67, 0.68, 0.69, 0.70, 0.71, 0.72, 0.73, 0.74, 0.75, 0.76, 0.77, 0.78, 0.79, 0.80, 0.81, 0.82, 0.83, 0.84, 0.85, 0.86, 0.87, 0.88, 0.89, 0.90, 0.91, 0.92, 0.93, 0.94, 0.95, 0.96, 0.97, 0.98, 0.99 or 1.00.

[1960] In any of the methods described herein, the interval may be defined as a range having as a lower limit any number between 0.60 and 1. The lower limit number may be 0.60, 0.61, 0.62, 0.63, 0.64, 0.65, 0.66, 0.67, 0.68, 0.69, 0.70, 0.71, 0.72, 0.73, 0.74, 0.75, 0.76, 0.77, 0.78, 0.79, 0.80, 0.81, 0.82, 0.83, 0.84, 0.85, 0.86, 0.87, 0.88, 0.89, 0.90, 0.91, 0.92, 0.93, 0.94, 0.95, 0.96, 0.97, 0.98, 0.99 or 1.00.

[1961] In any of the methods described herein, the interval range may comprise any of the above lower limit numbers combined with any of the above upper limit numbers as appropriate.

[1962] Preferably, the upper limit number is 1. Thus, the 95% confidence ROC AUC interval may be defined as a range having an upper limit of 1 and as a lower limit any number between 0.60 and 1. The lower limit number may be 0.60, 0.61, 0.62, 0.63, 0.64, 0.65, 0.66, 0.67, 0.68, 0.69, 0.70, 0.71, 0.72, 0.73, 0.74, 0.75, 0.76, 0.77, 0.78, 0.79, 0.80, 0.81, 0.82, 0.83, 0.84, 0.85, 0.86, 0.87, 0.88, 0.89, 0.90, 0.91, 0.92, 0.93, 0.94, 0.95, 0.96, 0.97, 0.98, 0.99 or 1.00.

[1963] The upper limit number may be 0.99. Thus, the 95% confidence ROC AUC interval may be defined as a range having an upper limit of 0.99 and as a lower limit any number between 0.60 and 0.99. The lower limit number may be 0.60, 0.61, 0.62, 0.63, 0.64, 0.65, 0.66, 0.67, 0.68, 0.69, 0.70, 0.71, 0.72, 0.73, 0.74, 0.75, 0.76, 0.77, 0.78, 0.79, 0.80, 0.81, 0.82, 0.83, 0.84, 0.85, 0.86, 0.87, 0.88, 0.89, 0.90, 0.91, 0.92, 0.93, 0.94, 0.95, 0.96, 0.97, 0.98 or 0.99.

[1964] The upper limit number may be 0.98. Thus, the 95% confidence ROC AUC interval may be defined as a range having an upper limit of 0.98 and as a lower limit any number between 0.60 and 0.98. The lower limit number may be 0.60, 0.61, 0.62, 0.63, 0.64, 0.65, 0.66, 0.67, 0.68, 0.69, 0.70, 0.71, 0.72, 0.73, 0.74, 0.75, 0.76, 0.77, 0.78, 0.79, 0.80, 0.81, 0.82, 0.83, 0.84, 0.85, 0.86, 0.87, 0.88, 0.89, 0.90, 0.91, 0.92, 0.93, 0.94, 0.95, 0.96, 0.97 or 0.98.

[1965] The upper limit number may be 0.97. Thus, the 95% confidence ROC AUC interval may be defined as a range having an upper limit of 0.97 and as a lower limit any number between 0.60 and 0.97. The lower limit number may be 0.60, 0.61, 0.62, 0.63, 0.64, 0.65, 0.66, 0.67, 0.68, 0.69, 0.70, 0.71, 0.72, 0.73, 0.74, 0.75, 0.76, 0.77, 0.78, 0.79, 0.80, 0.81, 0.82, 0.83, 0.84, 0.85, 0.86, 0.87, 0.88, 0.89, 0.90, 0.91, 0.92, 0.93, 0.94, 0.95, 0.96 or 0.97.

[1966] The upper limit number may be 0.96. Thus, the 95% confidence ROC AUC interval may be defined as a range having an upper limit of 0.96 and as a lower limit any number between 0.60 and 0.96. The lower limit number may be 0.60, 0.61, 0.62, 0.63, 0.64, 0.65, 0.66, 0.67, 0.68, 0.69, 0.70, 0.71, 0.72, 0.73, 0.74, 0.75, 0.76, 0.77, 0.78, 0.79, 0.80, 0.81, 0.82, 0.83, 0.84, 0.85, 0.86, 0.87, 0.88, 0.89, 0.90, 0.91, 0.92, 0.93, 0.94, 0.95 or 0.96.

[1967] The upper limit number may be 0.95. Thus, the 95% confidence ROC AUC interval may be defined as a range having an upper limit of 0.95 and as a lower limit any number between 0.60 and 0.95. The lower limit number may be 0.60, 0.61, 0.62, 0.63, 0.64, 0.65, 0.66, 0.67, 0.68, 0.69, 0.70, 0.71, 0.72, 0.73, 0.74, 0.75, 0.76, 0.77, 0.78, 0.79, 0.80, 0.81, 0.82, 0.83, 0.84, 0.85, 0.86, 0.87, 0.88, 0.89, 0.90, 0.91, 0.92, 0.93, 0.94 or 0.95.

[1968] The upper limit number may be 0.94. Thus, the 95% confidence ROC AUC interval may be defined as a range having an upper limit of 0.94 and as a lower limit any number between 0.60 and 0.94. The lower limit number may be 0.60, 0.61, 0.62, 0.63, 0.64, 0.65, 0.66, 0.67, 0.68, 0.69, 0.70, 0.71, 0.72, 0.73, 0.74, 0.75, 0.76, 0.77, 0.78, 0.79, 0.80, 0.81, 0.82, 0.83, 0.84, 0.85, 0.86, 0.87, 0.88, 0.89, 0.90, 0.91, 0.92, 0.93 or 0.94.

[1969] The upper limit number may be 0.93. Thus, the 95% confidence ROC AUC interval may be defined as a range having an upper limit of 0.93 and as a lower limit any number between 0.60 and 0.93. The lower limit number may be 0.60, 0.61, 0.62, 0.63, 0.64, 0.65, 0.66, 0.67, 0.68, 0.69, 0.70, 0.71, 0.72, 0.73, 0.74, 0.75, 0.76, 0.77, 0.78, 0.79, 0.80, 0.81, 0.82, 0.83, 0.84, 0.85, 0.86, 0.87, 0.88, 0.89, 0.90, 0.91, 0.92 or 0.93.

[1970] The upper limit number may be 0.92. Thus, the 95% confidence ROC AUC interval may be defined as a range having an upper limit of 0.92 and as a lower limit any number between 0.60 and 0.92. The lower limit number may be 0.60, 0.61, 0.62, 0.63, 0.64, 0.65, 0.66, 0.67, 0.68, 0.69, 0.70, 0.71, 0.72, 0.73, 0.74, 0.75, 0.76, 0.77, 0.78, 0.79, 0.80, 0.81, 0.82, 0.83, 0.84, 0.85, 0.86, 0.87, 0.88, 0.89, 0.90, 0.91 or 0.92.

[1971] The upper limit number may be 0.91. Thus, the 95% confidence ROC AUC interval may be defined as a range having an upper limit of 0.91 and as a lower limit any number between 0.60 and 0.91. The lower limit number may be 0.60, 0.61, 0.62, 0.63, 0.64, 0.65, 0.66, 0.67, 0.68, 0.69, 0.70, 0.71, 0.72, 0.73, 0.74, 0.75, 0.76, 0.77, 0.78, 0.79, 0.80, 0.81, 0.82, 0.83, 0.84, 0.85, 0.86, 0.87, 0.88, 0.89, 0.90 or 0.91.

[1972] The upper limit number may be 0.90. Thus, the 95% confidence ROC AUC interval may be defined as a range having an upper limit of 0.90 and as a lower limit any number between 0.60 and 0.90. The lower limit number may be 0.60, 0.61, 0.62, 0.63, 0.64, 0.65, 0.66, 0.67, 0.68, 0.69, 0.70, 0.71, 0.72, 0.73, 0.74, 0.75, 0.76, 0.77, 0.78, 0.79, 0.80, 0.81, 0.82, 0.83, 0.84, 0.85, 0.86, 0.87, 0.88, 0.89 or 0.90.

[1973] The upper limit number may be 0.89. Thus, the 95% confidence ROC AUC interval may be defined as a range having an upper limit of 0.89 and as a lower limit any number between 0.60 and 0.89. The lower limit number may be 0.60, 0.61, 0.62, 0.63, 0.64, 0.65, 0.66, 0.67, 0.68, 0.69, 0.70, 0.71, 0.72, 0.73, 0.74, 0.75, 0.76, 0.77, 0.78, 0.79, 0.80, 0.81, 0.82, 0.83, 0.84, 0.85, 0.86, 0.87, 0.88 or 0.89.

[1974] The upper limit number may be 0.88. Thus, the 95% confidence ROC AUC interval may be defined as a range having an upper limit of 0.88 and as a lower limit any number between 0.60 and 0.88. The lower limit number may be 0.60, 0.61, 0.62, 0.63, 0.64, 0.65, 0.66, 0.67, 0.68, 0.69, 0.70, 0.71, 0.72, 0.73, 0.74, 0.75, 0.76, 0.77, 0.78, 0.79, 0.80, 0.81, 0.82, 0.83, 0.84, 0.85, 0.86, 0.87 or 0.88.

[1975] The upper limit number may be 0.87. Thus, the 95% confidence ROC AUC interval may be defined as a range having an upper limit of 0.87 and as a lower limit any number between 0.60 and 0.87. The lower limit number may be 0.60, 0.61, 0.62, 0.63, 0.64, 0.65, 0.66, 0.67, 0.68, 0.69, 0.70, 0.71, 0.72, 0.73, 0.74, 0.75, 0.76, 0.77, 0.78, 0.79, 0.80, 0.81, 0.82, 0.83, 0.84, 0.85, 0.86 or 0.87.

[1976] The upper limit number may be 0.86. Thus, the 95% confidence ROC AUC interval may be defined as a range having an upper limit of 0.86 and as a lower limit any number between 0.60 and 0.86. The lower limit number may be 0.60, 0.61, 0.62, 0.63, 0.64, 0.65, 0.66, 0.67, 0.68, 0.69, 0.70, 0.71, 0.72, 0.73, 0.74, 0.75, 0.76, 0.77, 0.78, 0.79, 0.80, 0.81, 0.82, 0.83, 0.84, 0.85 or 0.86.

[1977] The upper limit number may be 0.85. Thus, the 95% confidence ROC AUC interval may be defined as a range having an upper limit of 0.85 and as a lower limit any number between 0.60 and 0.85. The lower limit number may be 0.60, 0.61, 0.62, 0.63, 0.64, 0.65, 0.66, 0.67, 0.68, 0.69, 0.70, 0.71, 0.72, 0.73, 0.74, 0.75, 0.76, 0.77, 0.78, 0.79, 0.80, 0.81, 0.82, 0.83, 0.84 or 0.85.

[1978] The upper limit number may be 0.84. Thus, the 95% confidence ROC AUC interval may be defined as a range having an upper limit of 0.84 and as a lower limit any number between 0.60 and 0.84. The lower limit number may be 0.60, 0.61, 0.62, 0.63, 0.64, 0.65, 0.66, 0.67, 0.68, 0.69, 0.70, 0.71, 0.72, 0.73, 0.74, 0.75, 0.76, 0.77, 0.78, 0.79, 0.80, 0.81, 0.82, 0.83 or 0.84.

[1979] The upper limit number may be 0.83. Thus, the 95% confidence ROC AUC interval may be defined as a range having an upper limit of 0.83 and as a lower limit any number between 0.60 and 0.83. The lower limit number may be 0.60, 0.61, 0.62, 0.63, 0.64, 0.65, 0.66, 0.67, 0.68, 0.69, 0.70, 0.71, 0.72, 0.73, 0.74, 0.75, 0.76, 0.77, 0.78, 0.79, 0.80, 0.81, 0.82 or 0.83.

[1980] The upper limit number may be 0.82. Thus, the 95% confidence ROC AUC interval may be defined as a range having an upper limit of 0.82 and as a lower limit any number between 0.60 and 0.82. The lower limit number may be 0.60, 0.61, 0.62, 0.63, 0.64, 0.65, 0.66, 0.67, 0.68, 0.69, 0.70, 0.71, 0.72, 0.73, 0.74, 0.75, 0.76, 0.77, 0.78, 0.79, 0.80, 0.81 or 0.82.

[1981] The upper limit number may be 0.81. Thus, the 95% confidence ROC AUC interval may be defined as a range having an upper limit of 0.81 and as a lower limit any number between 0.60 and 0.81. The lower limit number may be 0.60, 0.61, 0.62, 0.63, 0.64, 0.65, 0.66, 0.67, 0.68, 0.69, 0.70, 0.71, 0.72, 0.73, 0.74, 0.75, 0.76, 0.77, 0.78, 0.79, 0.80 or 0.81.

[1982] The upper limit number may be 0.80. Thus, the 95% confidence ROC AUC interval may be defined as a range having an upper limit of 0.80 and as a lower limit any number between 0.60 and 0.80. The lower limit number may be 0.60, 0.61, 0.62, 0.63, 0.64, 0.65, 0.66, 0.67, 0.68, 0.69, 0.70, 0.71, 0.72, 0.73, 0.74, 0.75, 0.76, 0.77, 0.78, 0.79 or 0.80.

[1983] The upper limit number may be 0.79. Thus, the 95% confidence ROC AUC interval may be defined as a range having an upper limit of 0.79 and as a lower limit any number between 0.60 and 0.79. The lower limit number may be 0.60, 0.61, 0.62, 0.63, 0.64, 0.65, 0.66, 0.67, 0.68, 0.69, 0.70, 0.71, 0.72, 0.73, 0.74, 0.75, 0.76, 0.77, 0.78 or 0.79.

[1984] The upper limit number may be 0.78. Thus, the 95% confidence ROC AUC interval may be defined as a range having an upper limit of 0.78 and as a lower limit any number between 0.60 and 0.78. The lower limit number may be 0.60, 0.61, 0.62, 0.63, 0.64, 0.65, 0.66, 0.67, 0.68, 0.69, 0.70, 0.71, 0.72, 0.73, 0.74, 0.75, 0.76, 0.77 or 0.78.

[1985] The upper limit number may be 0.77. Thus, the 95% confidence ROC AUC interval may be defined as a range having an upper limit of 0.77 and as a lower limit any number between 0.60 and 0.77. The lower limit number may be 0.60, 0.61, 0.62, 0.63, 0.64, 0.65, 0.66, 0.67, 0.68, 0.69, 0.70, 0.71, 0.72, 0.73, 0.74, 0.75, 0.76 or 0.77.

[1986] The upper limit number may be 0.76. Thus, the 95% confidence ROC AUC interval may be defined as a range having an upper limit of 0.76 and as a lower limit any number between 0.60 and 0.76. The lower limit number may be 0.60, 0.61, 0.62, 0.63, 0.64, 0.65, 0.66, 0.67, 0.68, 0.69, 0.70, 0.71, 0.72, 0.73, 0.74, 0.75 or 0.76.

[1987] The upper limit number may be 0.75. Thus, the 95% confidence ROC AUC interval may be defined as a range having an upper limit of 0.75 and as a lower limit any number between 0.60 and 0.75. The lower limit number may be 0.60, 0.61, 0.62, 0.63, 0.64, 0.65, 0.66, 0.67, 0.68, 0.69, 0.70, 0.71, 0.72, 0.73, 0.74 or 0.75.

[1988] The upper limit number may be 0.74. Thus, the 95% confidence ROC AUC interval may be defined as a range having an upper limit of 0.74 and as a lower limit any number between 0.60 and 0.74. The lower limit number may be 0.60, 0.61, 0.62, 0.63, 0.64, 0.65, 0.66, 0.67, 0.68, 0.69, 0.70, 0.71, 0.72, 0.73 or 0.74.

[1989] The upper limit number may be 0.73. Thus, the 95% confidence ROC AUC interval may be defined as a range having an upper limit of 0.73 and as a lower limit any number between 0.60 and 0.73. The lower limit number may be 0.60, 0.61, 0.62, 0.63, 0.64, 0.65, 0.66, 0.67, 0.68, 0.69, 0.70, 0.71, 0.72 or 0.73.

[1990] The upper limit number may be 0.72. Thus, the 95% confidence ROC AUC interval may be defined as a range having an upper limit of 0.72 and as a lower limit any number between 0.60 and 0.72. The lower limit number may be 0.60, 0.61, 0.62, 0.63, 0.64, 0.65, 0.66, 0.67, 0.68, 0.69, 0.70, 0.71 or 0.72.

[1991] The upper limit number may be 0.71. Thus, the 95% confidence ROC AUC interval may be defined as a range having an upper limit of 0.71 and as a lower limit any number between 0.60 and 0.71. The lower limit number may be 0.60, 0.61, 0.62, 0.63, 0.64, 0.65, 0.66, 0.67, 0.68, 0.69, 0.70 or 0.71.

[1992] The upper limit number may be 0.70. Thus, the 95% confidence ROC AUC interval may be defined as a range having an upper limit of 0.70 and as a lower limit any number between 0.60 and 0.70. The lower limit number may be 0.60, 0.61, 0.62, 0.63, 0.64, 0.65, 0.66, 0.67, 0.68, 0.69 or 0.70.

### Methods of Treatment and Diagnosis

[1993] The term “treatment” as used herein is intended to refer to any intervention or procedure performed on an individual, including a surgical intervention or a pharmacological intervention such as the administration of a compound or drug. Any such treatment may be performed for therapeutic purposes or for preventative or prophylactic purposes.

[1994] The invention also encompasses the performance of one or more treatment steps following a positive classification of CIN3 and/or cancer, particularly cervical and/or endometrial cancer, based on any of the methods described herein. Said treatments may be considered “therapeutic” treatments.

[1995] The invention also encompasses the performance of one or more treatment steps following a negative classification of CIN3 and/or cancer or prediction of an individual being at risk of cancer development, particularly cervical and/or endometrial cancer, based on any of the methods described herein. Said treatments may be considered “risk prevention”, “preventative” or “prophylactic” treatments.

[1996] The invention also encompasses the performance of one or more treatment steps following a negative classification of CIN3 and/or cancer or prediction of an individual being at risk of CIN3 and/or cancer development based on any of the methods described herein, in an individual that harbours one or more mutations that predispose the individual to an increased risk of developing CIN3 and/or cancer.

[1997] The invention thus encompasses a method of treating a cancer and/or CIN3 patient comprising administering chemotherapy, radiation, immunotherapy or any therapy described herein to the patient determined to have a cancer index value which indicates that the patient has is positive for cancer and/or CIN3 based on any of the assays described herein, preferably wherein the cancer is cervical cancer.

[1998] The invention thus encompasses a method of treating and/or preventing CIN3 and/or cancer in an individual, the method comprising:
[1999] a. assessing the cancer status of the individual by assessing the presence, absence or development of CIN3 and/or cancer, particularly cervical or endometrial cancer, most preferably cervical cancer, in the individual by performing any one of the assays described herein;
[2000] b. administering one or more therapeutic or preventative treatments to the individual based on the assessment, preferably wherein the cancer is cervical and/or endometrial cancer, most preferably cervical cancer.

[2001] The invention thus encompasses a method of treating and/or preventing cancer in an individual, the method comprising:
[2002] a. assessing the cancer status of the individual by assessing the presence, absence or development of CIN3 and/or cancer, particularly cervical or endometrial cancer, most preferably cervical cancer, in the individual comprising:
   [2003] i. providing a sample which has been taken from the individual, the sample comprising a population of DNA molecules;
   [2004] ii. determining in the population of DNA molecules in the sample the methylation status of a panel of:
      [2005] 1. one or more CpGs selected from a panel of CpGs identified in SEQ ID NOs 1 to 5000 wherein the CpGs are identified at nucleotide positions 61 to 62; and/or
      [2006] 2. one or more CpGs selected from within a panel of one or more Differentially Methylated Regions (DMRs) defined by SEQ ID NOs 5001 to 5418, wherein the CpGs are denoted by CG;
   [2007] iii. deriving a cancer index value based on the methylation status of the one or more CpGs in the panel; and
   [2008] iv. assessing the presence, absence or development of CIN3 and/or cancer, particularly cervical or endometrial cancer, most preferably cervical cancer, in the individual based on the cancer index value, wherein the assay is characterised as having an area under the curve (AUC) of 0.60 or more as determined by receiver operating characteristics (ROC);
[2009] b. administering one or more therapeutic treatments to the individual based on the assessment,
[2010] preferably wherein the cancer in cervical and/or endometrial cancer, most preferably cervical cancer.

[2011] In any of the methods of treatment encompassed by the invention, the step of predicting the presence or development of CIN3 and/or cancer, preferably wherein the cancer in cervical and/or endometrial cancer, in an individual may involve deriving a cancer index value.

[2012] In any of the methods of treatment encompassed by the invention, the step of predicting the presence or development of CIN3 and/or cancer in an individual may involve the use of any one of the arrays described herein.

[2013] In any of the methods of treatment encompassed by the invention, the step of stratifying the individual may involve applying any one of the thresholds according to any one of the assays of the invention described herein.

[2014] The step of administering one or more treatments may comprise different treatment steps depending on the stratification of an individual on the basis of their CIN3 and/or cancer status or their risk of having CIN3 and/or cancer or on the basis of risk of CIN3 and/or cancer development, particularly cervical and/or endometrial cancer, most preferably cervical cancer. Particularly the amount of an invasiveness of the treatments administered may vary dependent on the stratification of an individual on the basis of their CIN3 and/or cancer status or their risk of having CIN3 and/or cancer or on the basis of their risk of CIN3 and/or cancer development. The treatments administered to the individual may comprise any treatments considered suitable by a person skilled in the art.

[2015] For example, when the individual is assessed as not having CIN3 and/or cancer, as having a low risk of having CIN3 and/or cancer or as having a low risk of CIN3 and/or cancer development, and wherein the cancer index value is about −0.530 or more and less than −0.330, and preferably wherein the assay comprises determining methylation β-values for each CpG in the panel of one or more CpGs the individual is subjected to one or more treatments according to cancer index value, the one or more treatments may comprise a repeat assay according to the assays of the invention described herein, preferably wherein the repeat assay is performed about one year after the previous assay, preferably wherein the cancer is cervical and/or endometrial cancer, most preferably wherein the cancer is cervical cancer.

[2016] For example, when the individual is assessed as having a moderate risk of having CIN3 and/or cancer or as having a moderate risk of CIN3 and/or cancer development, and wherein the cancer index value is about −0.330 or more and less than −0.170, and preferably wherein the assay comprises determining methylation β-values for each CpG in the panel of one or more CpGs the individual is subjected to one or more treatments according to cancer index value, the one or more treatments may comprise a test for human papilloma virus (HPV) status and wherein:
[2017] 1. when the individual is HPV positive, a colposcopy, and optionally a transvaginal ultrasound and/or an endometrial biopsy to assess endometrium; or
[2018] 2. when the individual is HPV negative, a repeat assay according to any one of the assays of the invention described herein, preferably wherein the repeat assay is performed about one year after the previous assay,
[2019] preferably wherein the cancer is cervical and/or endometrial cancer, most
[2020] preferably wherein the cancer is cervical cancer.

[2021] For example, when the individual is assessed as having CIN3 and/or cancer or as having a high risk of CIN3 and/or cancer development, and wherein the cancer index value is about −0.170 or more, and preferably wherein the assay comprises determining methylation β-values for each CpG in the panel of one or more CpGs the individual is subjected to one or more treatments according to cancer index value, the one or more treatments may comprise a colposcopy, and wherein the colposcopy is negative, an endometrial biopsy and hysteroscopy.

[2022] For example, when the individual is assessed as having CIN3 and/or cancer or as having a high risk of CIN3 and/or cancer development, and wherein the cancer index value is about:
[2023] a. 5.000 or more, preferably wherein the step of determining the methylation status of the one or more CpGs in the panel comprises determining each CpG within SEQ ID NO 5768 and/or SEQ ID NO 5712 and/or SEQ ID NO 5740;
[2024] b. 1.000 or more, preferably wherein the step of determining the methylation status of the one or more CpGs in the panel comprises determining each CpG within SEQ ID NO 5765 and/or SEQ ID NO 5709 and/or SEQ ID NO 5737;
[2025] c. 2.000 or more, preferably wherein the step of determining the methylation status of the one or more CpGs in the panel comprises determining each CpG within SEQ ID NO 5759 and/or SEQ ID NO 5703 and/or SEQ ID NO 5731;
[2026] d. 5.000 or more, preferably wherein the step of determining the methylation status of the one or more CpGs in the panel comprises determining each CpG within SEQ ID NO 5785 and/or SEQ ID NO 5729 and/or SEQ ID NO 5757;
[2027] e. 4.000 or more, preferably wherein the step of determining the methylation status of the one or more CpGs in the panel comprises determining each CpG within SEQ ID NO 5763 and/or SEQ ID NO 5707 and/or SEQ ID NO 5735;
[2028] f. 4.000 or more, preferably wherein the step of determining the methylation status of the one or more CpGs in the panel comprises determining each CpG within SEQ ID NO 5781 and/or SEQ ID NO 5725 and/or SEQ ID NO 5753;
[2029] g. 1.000 or more, preferably wherein the step of determining the methylation status of the one or more CpGs in the panel comprises determining each CpG within SEQ ID NO 5769 and/or SEQ ID NO 5713 and/or SEQ ID NO 5741;
[2030] h. 1.000 or more, preferably wherein the step of determining the methylation status of the one or more CpGs in the panel comprises determining each CpG within SEQ ID NO 5766 and/or SEQ ID NO 5710 and/or SEQ ID NO 5738;
[2031] i. 4.000 or more, preferably wherein the step of determining the methylation status of the one or more CpGs in the panel comprises determining each CpG within SEQ ID NO 5761 and/or SEQ ID NO 5705 and/or SEQ ID NO 5733;
[2032] j. 4.000 or more, preferably wherein the step of determining the methylation status of the one or more CpGs in the panel comprises determining each CpG within SEQ ID NO 5779 and/or SEQ ID NO 5723 and/or SEQ ID NO 5751;
[2033] k. 4.000 or more, preferably wherein the step of determining the methylation status of the one or more CpGs in the panel comprises determining each CpG within SEQ ID NO 5764 and/or SEQ ID NO 5708 and/or SEQ ID NO 5736;
[2034] l. 5.000 or more, preferably wherein the step of determining the methylation status of the one or more CpGs in the panel comprises determining each CpG within SEQ ID NO 5772 and/or SEQ ID NO 5716 and/or SEQ ID NO 5744;
[2035] m. 2.000 or more, preferably wherein the step of determining the methylation status of the one or more CpGs in the panel comprises determining each CpG within SEQ ID NO 5773 and/or SEQ ID NO 5717 and/or SEQ ID NO 5745;
[2036] n. 1.000 or more, preferably wherein the step of determining the methylation status of the one or more CpGs in the panel comprises determining each CpG within SEQ ID NO 5778 and/or SEQ ID NO 5722 and/or SEQ ID NO 5750;
[2037] o. 5.000 or more, preferably wherein the step of determining the methylation status of the one or more CpGs in the panel comprises determining each CpG within SEQ ID NO 5767 and/or SEQ ID NO 5711 and/or SEQ ID NO 5739;
[2038] p. 5.000 or more, preferably wherein the step of determining the methylation status of the one or more CpGs in the panel comprises determining each CpG within SEQ ID NO 5774 and/or SEQ ID NO 5718 and/or SEQ ID NO 5746;
[2039] q. more than 0.000, preferably wherein the step of determining the methylation status of the one or more CpGs in the panel comprises determining each CpG within SEQ ID NO 5760 and/or SEQ ID NO 5704 and/or SEQ ID NO 5732;
[2040] r. 4.000 or more, preferably wherein the step of determining the methylation status of the one or more CpGs in the panel comprises determining each CpG within SEQ ID NO 5771 and/or SEQ ID NO 5715 and/or SEQ ID NO 5743;
[2041] s. 2.000 or more, preferably wherein the step of determining the methylation status of the one or more CpGs in the panel comprises determining each CpG within SEQ ID NO 5762 and/or SEQ ID NO 5706 and/or SEQ ID NO 5734;
[2042] t. 7.000 or more, preferably wherein the step of determining the methylation status of the one or more CpGs in the panel comprises determining each CpG within SEQ ID NO 5780 and/or SEQ ID NO 5724 and/or SEQ ID NO 5752;
[2043] u. 6.000 or more, preferably wherein the step of determining the methylation status of the one or more CpGs in the panel comprises determining each CpG within SEQ ID NO 5776 and/or SEQ ID NO 5720 and/or SEQ ID NO 5748;
[2044] v. 5.000 or more, preferably wherein the step of determining the methylation status of the one or more CpGs in the panel comprises determining each CpG within SEQ ID NO 5783 and/or SEQ ID NO 5727 and/or SEQ ID NO 5755;
[2045] w. 6.000 or more, preferably wherein the step of determining the methylation status of the one or more CpGs in the panel comprises determining each CpG within SEQ ID NO 5782 and/or SEQ ID NO 5726 and/or SEQ ID NO 5754;
[2046] x. 6.000 or more, preferably wherein the step of determining the methylation status of the one or more CpGs in the panel comprises determining each CpG within SEQ ID NO 5784 and/or SEQ ID NO 5728 and/or SEQ ID NO 5756;
[2047] y. 5.000 or more, preferably wherein the step of determining the methylation status of the one or more CpGs in the panel comprises determining each CpG within SEQ ID NO 5777 and/or SEQ ID NO 5721 and/or SEQ ID NO 5749;
[2048] z. 2.000 or more, preferably wherein the step of determining the methylation status of the one or more CpGs in the panel comprises determining each CpG within SEQ ID NO 5786 and/or SEQ ID NO 5730 and/or SEQ ID NO 5758;
[2049] aa. 7.000 or more, preferably wherein the step of determining the methylation status of the one or more CpGs in the panel comprises determining each CpG within SEQ ID NO 5775 and/or SEQ ID NO 5719 and/or SEQ ID NO 5747; or
[2050] bb. 3.000 or more, preferably wherein the step of determining the methylation status of the one or more CpGs in the panel comprises determining each CpG within SEQ ID NO 5770 and/or SEQ ID NO 5714 and/or SEQ ID NO 5742,
[2051] and more preferably wherein the assay comprises determining percent methylated reference for the sequence defined by the specified SEQ ID NO, the individual is subjected to one or more treatments according to their cancer index value, the one or more treatments comprise a colposcopy, and wherein the colposcopy is negative, an endometrial biopsy, and wherein the endometrial biopsy is also negative, a repeat assay according to any one of assays of the invention described herein, preferably wherein the repeat assay is performed about one year after the previous assay, or when the individual's cancer index value according to 1. to 28 is less than the specified cancer index value no treatment is administered to the individual.

[2052] In any of the assays described herein, the one or more treatments that the individual is subjected may be repeated at any suitable interval as would be understood by a person skilled in the art. For example, any one of the one or more treatments that the individual is subjected to are repeated on a monthly, three monthly, six monthly, yearly or two yearly basis following an initial administration.

[2053] Other exemplary treatments comprise one or more surgical procedures, one or more chemotherapeutic agents, one or more cytotoxic chemotherapeutic agents one or more radiotherapeutic agents, one or more immunotherapeutic agents, one or more biological therapeutics, one or more anti-hormonal treatments or any combination of the above following a positive diagnosis of cancer.

[2054] In any of the methods of treatment described herein, the individual may particularly be administered treatments recited in Table 9. Four sub-groups defined by ranges of cancer index values are specified in Table 9 as corresponding to preferred clinical actions, comprising intensified screening, administration of therapeutics and surgery.

[2055] Cancer treatments may be administered to an individual harbouring cancer or at risk of cancer development, in an amount sufficient to prevent, treat, cure, alleviate or partially arrest cancer or one or more of its symptoms. Such treatments may result in a decrease in severity, and/or decreased cancer index value, of cancer symptoms, or an increase in frequency or duration of symptom-free periods. A treatment amount adequate to accomplish this defined as “therapeutically effective amount”. Effective amounts for a given purpose will depend on the severity of cancer and/or the individual's cancer index value as well as the weight and general state of the individual. As used herein, the term “individual” includes any human, preferably wherein the human is a woman. As used herein, “treatment” is to be considered synonymous with “therapeutic agent”.

[2056] The following therapeutic agents may be administered to an individual based on their cancer risk alone or in combination with any other treatment described herein. The therapeutic agent may be directly attached, for example by chemical conjugation, to an antibody. Methods of conjugating agents or labels to an antibody are known in the art. For example, carbodiimide conjugation (Bauminger & Wilchek (1980) Methods Enzymol. 70, 151-159) may be used to conjugate a variety of agents, including doxorubicin, to antibodies or peptides. The water-soluble carbodiimide, 1-ethyl-3-β-dimethylaminopropyl) carbodiimide (EDC) is particularly useful for conjugating a functional moiety to a binding moiety. Other methods for conjugating a moiety to antibodies can also be used. For example, sodium periodate oxidation followed by reductive alkylation of appropriate reactants can be used, as can glutaraldehyde cross-linking. However, it is recognised that, regardless of which method of producing a conjugate of the invention is selected, a determination must be made that the antibody maintains its targeting ability and that the functional moiety maintains its relevant function.

[2057] A cytotoxic moiety may be directly and/or indirectly cytotoxic. By “directly cytotoxic” it is meant that the moiety is one which on its own is cytotoxic. By “indirectly cytotoxic” it is meant that the moiety is one which, although is not itself cytotoxic, can induce cytotoxicity, for example by its action on a further molecule or by further action on it. The cytotoxic moiety may be cytotoxic only when intracellular and is preferably not cytotoxic when extracellular.

[2058] Cytotoxic chemotherapeutic agents are well known in the art. Cytotoxic chemotherapeutic agents, such as anticancer agents, include: alkylating agents including nitrogen mustards such as mechlorethamine (HN2), cyclophosphamide, ifosfamide, melphalan (L-sarcolysin) and chlorambucil; ethylenimines and methylmelamines such as hexamethylmelamine, thiotepa; alkyl sulphonates such as busulfan; nitrosoureas such as carmustine (BCNU), lomustine (CCNU), semustine (methyl-CCNU) and streptozocin (streptozotocin); and triazenes such as decarbazine (DTIC; dimethyltriazenoimidazole-carboxamide); Antimetabolites including folic acid analogues such as methotrexate (amethopterin); pyrimidine analogues such as fluorouracil (5-fluorouracil; 5-FU), floxuridine (fluorodeoxyuridine; FUdR) and cytarabine (cytosine arabinoside); and purine analogues and related inhibitors such as mercaptopurine (6-mercaptopurine; 6-MP), thioguanine (6-thioguanine; TG) and pentostatin (2′-deoxycoformycin). Natural Products including vinca alkaloids such as vinblastine (VLB) and vincristine; epipodophyllotoxins such as etoposide and teniposide; antibiotics such as dactinomycin (actinomycin D), daunorubicin (daunomycin; rubidomycin), doxorubicin, bleomycin, plicamycin (mithramycin) and mitomycin (mitomycin C); enzymes such as L-asparaginase; and biological response modifiers such as interferon alphenomes. Miscellaneous agents including platinum coordination complexes such as cisplatin (cis-DDP) and carboplatin; anthracenedione such as mitoxantrone and anthracycline; substituted urea such as hydroxyurea; methyl hydrazine derivative such as procarbazine (N-methylhydrazine, MIH); and adrenocortical suppressant such as mitotane (o,p′-DDD) and aminoglutethimide; taxol and analogues/derivatives; and hormone agonists/antagonists such as flutamide and tamoxifen.

[2059] A cytotoxic chemotherapeutic agent may be a cytotoxic peptide or polypeptide moiety which leads to cell death. Cytotoxic peptide and polypeptide moieties are well known in the art and include, for example, ricin, abrin, Pseudomonas exotoxin, tissue factor and the like. Methods for linking them to targeting moieties such as antibodies are also known in the art. Other ribosome inactivating proteins are described as cytotoxic agents in WO 96/06641. Pseudomonas exotoxin may also be used as the cytotoxic polypeptide. Certain cytokines, such as TNFα and IL-2, may also be useful as cytotoxic agents.

[2060] Certain radioactive atoms may also be cytotoxic if delivered in sufficient doses. Radiotherapeutic agents may comprise a radioactive atom which, in use, delivers a sufficient quantity of radioactivity to the target site so as to be cytotoxic. Suitable radioactive atoms include phosphorus-32, iodine-125, iodine-131, indium-111, rhenium-186, rhenium-188 or yttrium-90, or any other isotope which emits enough energy to destroy neighbouring cells, organelles or nucleic acid. Preferably, the isotopes and density of radioactive atoms in the agents of the invention are such that a dose of more than 4000 cGy (preferably at least 6000, 8000 or 10000 cGy) is delivered to the target site and, preferably, to the cells at the target site and their organelles, particularly the nucleus.

[2061] The radioactive atom may be attached to an antibody, antigen-binding fragment, variant, fusion or derivative thereof in known ways. For example, EDTA or another chelating agent may be attached to the binding moiety and used to attach 111In or 90Y. Tyrosine residues may be directly labelled with 1251 or 1311.

[2062] A cytotoxic chemotherapeutic agent may be a suitable indirectly-cytotoxic polypeptide. In a particularly preferred embodiment, the indirectly cytotoxic polypeptide is a polypeptide which has enzymatic activity and can convert a non-toxic and/or relatively non-toxic prodrug into a cytotoxic drug. With antibodies, this type of system is often referred to as ADEPT (Antibody-Directed Enzyme Prodrug Therapy). The system requires that the antibody locates the enzymatic portion to the desired site in the body of the patient and after allowing time for the enzyme to localise at the site, administering a prodrug which is a substrate for the enzyme, the end product of the catalysis being a cytotoxic compound. The object of the approach is to maximise the concentration of drug at the desired site and to minimise the concentration of drug in normal tissues. In a preferred embodiment, the cytotoxic moiety is capable of converting a non-cytotoxic prodrug into a cytotoxic drug.

[2063] In any of the methods of treatment described herein, the one or more treatments that the individual is subjected to may be repeated on one or more occasions. The one or more treatments may be repeated at regular intervals. The repetitive nature of the treatment administration may depend on the particular treatment being administered. Some treatments may require repetitive administration at greater frequency than others. The skilled person would be aware of the frequency of administration required for therapies known in the art. The one or more treatments may be repeated weekly, two weekly, three weekly, four weekly, monthly, three monthly, six monthly, yearly, two yearly, three yearly, four yearly, or five yearly.

[2064] In any of the methods described herein, when the individual is assessed as having a cancer index value of is less than about −0.530, and preferably wherein the assay comprises determining methylation β-values for each CpG in the panel of one or more CpGs, no treatment is administered to the individual.

[2065] In any of the methods described herein, when the individual is assessed as having a cancer index value of is:
[2066] 1. less than about 5.000, and preferably wherein the step of determining the methylation status of the one or more CpGs in the panel comprises determining each CpG within SEQ ID NO 5768 and/or SEQ ID NO 5712 and/or SEQ ID NO 5740, and more preferably wherein the assay comprises determining percent methylated reference for the sequence defined by the specified SEQ ID NO, no treatment is administered to the individual;
[2067] 2. less than about 1.000, and preferably wherein the step of determining the methylation status of the one or more CpGs in the panel comprises determining each CpG within SEQ ID NO 5765 and/or SEQ ID NO 5709 and/or SEQ ID NO 5737, and more preferably wherein the assay comprises determining percent methylated reference for the sequence defined by the specified SEQ ID NO, no treatment is administered to the individual;
[2068] 3. less than about 2.000, and preferably wherein the step of determining the methylation status of the one or more CpGs in the panel comprises determining each CpG within SEQ ID NO 5759 and/or SEQ ID NO 5703 and/or SEQ ID NO 5731, and more preferably wherein the assay comprises determining percent methylated reference for the sequence defined by the specified SEQ ID NO, no treatment is administered to the individual;
[2069] 4. less than about 5.000, and preferably wherein the step of determining the methylation status of the one or more CpGs in the panel comprises determining each CpG within SEQ ID NO 5785 and/or SEQ ID NO 5729 and/or SEQ ID NO 5757, and more preferably wherein the assay comprises determining percent methylated reference for the sequence defined by the specified SEQ ID NO, no treatment is administered to the individual;
[2070] 5. less than about 4.000, and preferably wherein the step of determining the methylation status of the one or more CpGs in the panel comprises determining each CpG within SEQ ID NO 5763 and/or SEQ ID NO 5707 and/or SEQ ID NO 5735, and more preferably wherein the assay comprises determining percent methylated reference for the sequence defined by the specified SEQ ID NO, no treatment is administered to the individual;
[2071] 6. less than about 4.000, and preferably wherein the step of determining the methylation status of the one or more CpGs in the panel comprises determining each CpG within SEQ ID NO 5781 and/or SEQ ID NO 5725 and/or SEQ ID NO 5753, and more preferably wherein the assay comprises determining percent methylated reference for the sequence defined by the specified SEQ ID NO, no treatment is administered to the individual;
[2072] 7. less than about 1.000, and preferably wherein the step of determining the methylation status of the one or more CpGs in the panel comprises determining each CpG within SEQ ID NO 5769 and/or SEQ ID NO 5713 and/or SEQ ID NO 5741, and more preferably wherein the assay comprises determining percent methylated reference for the sequence defined by the specified SEQ ID NO, no treatment is administered to the individual;
[2073] 8. less than about 1.000, and preferably wherein the step of determining the methylation status of the one or more CpGs in the panel comprises determining each CpG within SEQ ID NO 5766 and/or SEQ ID NO 5710 and/or SEQ ID NO 5738, and more preferably wherein the assay comprises determining percent methylated reference for the sequence defined by the specified SEQ ID NO, no treatment is administered to the individual;
[2074] 9. less than about 4.000, and preferably wherein the step of determining the methylation status of the one or more CpGs in the panel comprises determining each CpG within SEQ ID NO 5761 and/or SEQ ID NO 5705 and/or SEQ ID NO 5733, and more preferably wherein the assay comprises determining percent methylated reference for the sequence defined by the specified SEQ ID NO, no treatment is administered to the individual;
[2075] 10. less than about 4.000, and preferably wherein the step of determining the methylation status of the one or more CpGs in the panel comprises determining each CpG within SEQ ID NO 5779 and/or SEQ ID NO 5723 and/or SEQ ID NO 5751, and more preferably wherein the assay comprises determining percent methylated reference for the sequence defined by the specified SEQ ID NO, no treatment is administered to the individual;
[2076] 11. less than about 4.000, and preferably wherein the step of determining the methylation status of the one or more CpGs in the panel comprises determining each CpG within SEQ ID NO 5764 and/or SEQ ID NO 5708 and/or SEQ ID NO 5736, and more preferably wherein the assay comprises determining percent methylated reference for the sequence defined by the specified SEQ ID NO, no treatment is administered to the individual;
[2077] 12. less than about 5.000, and preferably wherein the step of determining the methylation status of the one or more CpGs in the panel comprises determining each CpG within SEQ ID NO 5772 and/or SEQ ID NO 5716 and/or SEQ ID NO 5744, and more preferably wherein the assay comprises determining percent methylated reference for the sequence defined by the specified SEQ ID NO, no treatment is administered to the individual;
[2078] 13. less than about 2.000, and preferably wherein the step of determining the methylation status of the one or more CpGs in the panel comprises determining each CpG within SEQ ID NO 5773 and/or SEQ ID NO 5717 and/or SEQ ID NO 5745, and more preferably wherein the assay comprises determining percent methylated reference for the sequence defined by the specified SEQ ID NO, no treatment is administered to the individual;
[2079] 14. less than about 1.000, and preferably wherein the step of determining the methylation status of the one or more CpGs in the panel comprises determining each CpG within SEQ ID NO 5778 and/or SEQ ID NO 5772 and/or SEQ D NO 5750, and more preferably wherein the assay comprises determining percent methylated reference for the sequence defined by the specified SEQ ID NO, no treatment is administered to the individual;
[2080] 15. less than about 5.000, and preferably wherein the step of determining the methylation status of the one or more CpGs in the panel comprises determining each CpG within SEQ ID NO 5767 and/or SEQ ID NO 5711 and/or SEQ ID NO 5739, and more preferably wherein the assay comprises determining percent methylated reference for the sequence defined by the specified SEQ ID NO, no treatment is administered to the individual;
[2081] 16. less than about 5.000, and preferably wherein the step of determining the methylation status of the one or more CpGs in the panel comprises determining each CpG within SEQ ID NO 5774 and/or SEQ ID NO 5718 and/or SEQ ID NO 5746, and more preferably wherein the assay comprises determining percent methylated reference for the sequence defined by the specified SEQ ID NO, no treatment is administered to the individual;
[2082] 17. 0.000, preferably wherein the step of determining the methylation status of the one or more CpGs in the panel comprises determining each CpG within SEQ ID NO 5760 and/or SEQ ID NO 5704 and/or SEQ ID NO 5732, and more preferably wherein the assay comprises determining percent methylated reference for the sequence defined by the specified SEQ ID NO, no treatment is administered to the individual;
[2083] 18. less than about 4.000, and preferably wherein the step of determining the methylation status of the one or more CpGs in the panel comprises determining each CpG within SEQ ID NO 5771 and/or SEQ ID NO 5715 and/or SEQ ID NO 5743, and more preferably wherein the assay comprises determining percent methylated reference for the sequence defined by the specified SEQ ID NO, no treatment is administered to the individual;
[2084] 19. less than about 2.000, and preferably wherein the step of determining the methylation status of the one or more CpGs in the panel comprises determining each CpG within SEQ ID NO 5762 and/or SEQ ID NO 5706 and/or SEQ ID NO 5734, and more preferably wherein the assay comprises determining percent methylated reference for the sequence defined by the specified SEQ ID NO, no treatment is administered to the individual;
[2085] 20. less than about 7.000, and preferably wherein the step of determining the methylation status of the one or more CpGs in the panel comprises determining each CpG within SEQ ID NO 5780 and/or SEQ ID NO 5724 and/or SEQ ID NO 5752, and more preferably wherein the assay comprises determining percent methylated reference for the sequence defined by the specified SEQ ID NO, no treatment is administered to the individual;
[2086] 21. less than about 6.000, and preferably wherein the step of determining the methylation status of the one or more CpGs in the panel comprises determining each CpG within SEQ ID NO 5776 and/or SEQ ID NO 5720 and/or SEQ ID NO 5748, and more preferably wherein the assay comprises determining percent methylated reference for the sequence defined by the specified SEQ ID NO, no treatment is administered to the individual;
[2087] 22. less than about 5.000, and preferably wherein the step of determining the methylation status of the one or more CpGs in the panel comprises determining each CpG within SEQ ID NO 5783 and/or SEQ ID NO 5727 and/or SEQ ID NO 5755, and more preferably wherein the assay comprises determining percent methylated reference for the sequence defined by the specified SEQ ID NO, no treatment is administered to the individual;
[2088] 23. less than about 6.000, and preferably wherein the step of determining the methylation status of the one or more CpGs in the panel comprises determining each CpG within SEQ ID NO 5782 and/or SEQ ID NO 5726 and/or SEQ ID NO 5754, and more preferably wherein the assay comprises determining percent methylated reference for the sequence defined by the specified SEQ ID NO, no treatment is administered to the individual;
[2089] 24. less than about 6.000, and preferably wherein the step of determining the methylation status of the one or more CpGs in the panel comprises determining each CpG within SEQ ID NO 5784 and/or SEQ ID NO 5728 and/or SEQ ID NO 5756, and more preferably wherein the assay comprises determining percent methylated reference for the sequence defined by the specified SEQ ID NO, no treatment is administered to the individual;
[2090] 25. less than about 5.000, and preferably wherein the step of determining the methylation status of the one or more CpGs in the panel comprises determining each CpG within SEQ ID NO 5777 and/or SEQ ID NO 5721 and/or SEQ ID NO 5749, and more preferably wherein the assay comprises determining percent methylated reference for the sequence defined by the specified SEQ ID NO, no treatment is administered to the individual;
[2091] 26. less than about 2.000, and preferably wherein the step of determining the methylation status of the one or more CpGs in the panel comprises determining each CpG within SEQ ID NO 5786 and/or SEQ ID NO 5730 and/or SEQ ID NO 5758, and more preferably wherein the assay comprises determining percent methylated reference for the sequence defined by the specified SEQ ID NO, no treatment is administered to the individual;
[2092] 27. less than about 7.000, and preferably wherein the step of determining the methylation status of the one or more CpGs in the panel comprises determining each CpG within SEQ ID NO 5775 and/or SEQ ID NO 5719 and/or SEQ ID NO 5747, and more preferably wherein the assay comprises determining percent methylated reference for the sequence defined by the specified SEQ ID NO, no treatment is administered to the individual; or
[2093] 28. less than about 3.000, and preferably wherein the step of determining the methylation status of the one or more CpGs in the panel comprises determining each CpG within SEQ ID NO 5770 and/or SEQ ID NO 5714 and/or SEQ ID NO 5742, and more preferably wherein the assay comprises determining percent methylated reference for the sequence defined by the specified SEQ ID NO, no treatment is administered to the individual.

### Methods of Monitoring

[2094] The invention also provides methods of monitoring the presence, or risk of the presence or development of CIN3 and/or cancer in an individual.

[2095] “Monitoring” in the context of the present invention may refer to longitudinal assessment of an individual's CIN3 and/or cancer status, risk of harbouring CIN3 and/or cancer or risk of CIN3 and/or cancer development. This longitudinal assessment may be carried out according to any of the assays of the invention described herein. This longitudinal assessment may involve performance of any of the assays of the invention described herein to predict the presence or development of CIN3 and/or cancer in an individual at more than one time point over the course of an undetermined time window. The time window may be any period of time whilst the individual is still living. The time window may persist for the lifetime of the individual. The time window may persist until the individual's CIN3 and/or cancer status, risk of harbouring CIN3 and/or cancer or risk of CIN3 and/or cancer development falls below a certain level. The level may be a particular cancer index value.

[2096] The invention thus encompasses a method of monitoring for the presence, absence or development of CIN3 and/or cancer, particularly cervical or endometrial cancer, most preferably cervical cancer, particularly cervical and/or endometrial cancer, most preferably cervical cancer, in an individual, the method comprising:
[2097] a. assessing the presence or absence of CIN3 and/or cancer in an individual or assessing cancer development in an individual to establish a CIN3 and/or cancer status for the individual by performing any one of the assays of the invention described herein at a first time point;
[2098] b. assessing the presence or absence of CIN3 and/or cancer in the individual or assessing CIN3 and/or cancer development in the individual to establish a CIN3 and/or cancer status for the individual by performing any one of the assays of the invention described herein at one or more further time points, preferably wherein the CIN3 and/or cancer status of the individual in steps a and b are assessed using the same assay; and
[2099] c. monitoring any change in the CIN3 and/or cancer status of the individual between time points.

[2100] The invention also encompasses a method of monitoring for the presence, absence or development of CIN3 and/or cancer, particularly cervical or endometrial cancer, most preferably cervical cancer, particularly cervical and/or endometrial cancer, in an individual, the method comprising:
[2101] a. assessing the presence or absence of CIN3 and/or cancer in an individual or assessing cancer development in an individual to establish a CIN3 and/or cancer status for the individual by performing an assay at a first time point, comprising:
   [2102] 1. providing a sample which has been taken from the individual, the sample comprising a population of DNA molecules;
   [2103] 2. determining in the population of DNA molecules in the sample the methylation status of a panel of:
      [2104] a. one or more CpGs selected from a panel of CpGs identified in SEQ ID NOs 1 to 5000 wherein the CpGs are identified at nucleotide positions 61 to 62; and/or
      [2105] b. one or more CpGs selected from within a panel of one or more Differentially Methylated Regions (DMRs) defined by SEQ ID NOs 5001 to 5418, wherein the CpGs are denoted by CG;
   [2106] 3. deriving a cancer index value based on the methylation status of the one or more CpGs in the panel; and
   [2107] 4. assessing the presence, absence or development of CIN3 and/or cancer, particularly cervical or endometrial cancer, most preferably cervical cancer, in the individual based on the cancer index value, wherein the assay is characterised as having an area under the curve (AUC) of 0.60 or more as determined by receiver operating characteristics (ROC);
[2108] b. assessing the presence or absence of CIN3 and/or cancer in the individual or assessing cancer development in the individual to establish a CIN3 and/or cancer status for the individual by performing the assay of steps a(1) to a(4) or by performing any one of the assays of the invention described herein at one or more further time points; and
[2109] c. monitoring any change in the CIN3 and/or cancer status of the individual between time points.

[2110] In any of the methods of monitoring described herein, the steps of assessing the presence, absence or development of CIN3 and/or cancer, particularly cervical or endometrial cancer, most preferably cervical cancer, in an individual based on a cancer index value may involve the application of threshold values. Threshold values can provide an indication of an individual's CIN3 and/or cancer status, risk of having CIN3 and/or cancer or an individual's risk of CIN3 and/or cancer development. For example, cancer index values may indicate the presence or absence of CIN3 and/or cancer, or a high or low risk of having or developing CIN3 and/or cancer. In any of the methods of monitoring encompassed by the invention, the step of predicting the presence, absence or development of CIN3 and/or cancer, particularly cervical or endometrial cancer, most preferably cervical cancer, in an individual involves deriving a cancer index value.

[2111] The invention further encompasses a method of measuring methylation in a patient at multiple time points comprising (a) assessing the presence, absence or development of CIN3 and/or cancer in an individual by performing any one of the assays of the invention described herein at a first time point; (b) assessing the presence, absence or development of CIN3 and/or cancer in the individual by performing any one of the assays of the invention described herein at one or more further time points, and (c) detecting differential methylation status between (a) and (b).

[2112] In any of the methods of monitoring described herein, depending on the risk of the presence or development of CIN3 and/or cancer in the individual, one or more treatments are administered to the individual according to any one of the methods of treatment encompassed by the invention and described herein, or wherein the cancer index value of the individual is less than about −0.530, and preferably wherein the assay comprises determining methylation β-values for each CpG in the panel of one or more CpGs, no treatment is administered to the individual. Different treatments may be administered depending on the stratification of an individual on the basis of their CIN3 and/or cancer status, risk of harbouring CIN3 and/or cancer or on the basis of their risk of CIN3 and/or cancer development. The method may further comprise administration of one or more treatments according to the methods of treatment described herein.

[2113] The cancer index value may change between any two or more time points. For this reason, longitudinal monitoring of an individual's cancer index value could be of particular benefit to the assessment of, for example, cancer progression, prevention of recurrence of cancer, cancer treatment efficacy, or cancer efficacy.

[2114] In any of the methods of monitoring described herein, the one or more further time points may be any suitable time point. Preferably the one or more further time points may of suitable distance apart for sufficiently frequent screening in order to predict any particularly early onset cases of presence or development of cancer in an individual. Preferably the one or more further time points may be of suitable distance apart for assessing the efficacy of one or more treatments. Preferably the one or more further time points may be of suitable distance apart for predicting whether an individual remains free of cancer after a successful course of treatment. The one or more further time points may be about monthly, about two monthly, about three monthly, about four monthly, about five monthly, about six monthly, about seven monthly, about eight monthly, about nine monthly, about ten monthly, about eleven monthly, about yearly, about two yearly, or more than two yearly.

[2115] In any of the methods of monitoring described herein, changes may be made to the one or more treatments wherein a positive or negative responses to the one or more treatments are observed. Treatments may be changed in accordance with the methods of treatments described herein. Treatments may particularly be changed if the individual's cancer status or risk stratification, based on their cancer index value, changes.

[2116] In any of the methods of monitoring encompassed by the invention, the step of predicting the presence or development of CIN3 and/or cancer in an individual may involve the use of any one of the arrays described herein.

### Biological Samples

[2117] The assays described herein are preferably performed on DNA from cells derived from/obtained from samples from tissue in which the native tissue structure is preserved e.g. a biopsy, or a sample comprising exfoliated cells from a tissue surface. The samples may comprise epithelial cells. The sample may particularly be derived from the cervix, the vagina, the buccal area, blood and/or urine. The sample is preferably a cervical liquid-based cytology sample, and more preferably a cervical smear sample.

[2118] Preferably, any one of the assays described herein for assessing the presence, absence or development of CIN3 and/or cancer, particularly cervical or endometrial cancer, most preferably cervical cancer, in an individual comprises providing a sample which has been taken from the individual. Preferably the individual is a woman.

[2119] In any of the assays described herein, the assay may or may not encompass the step of obtaining the sample from the individual. In assays which do not encompass the step of obtaining the sample from the individual, a sample which has previously been obtained from the individual is provided.

[2120] The sample may be provided directly from the individual for analysis or may be derived from stored material, e.g. frozen, preserved, fixed or cryopreserved material.

[2121] In any of the assays described herein, the sample may be self-collected or collected by any suitable medical professional.

[2122] Any of the assays described herein, the sample may comprise cells. The sample may comprise genetic material such as DNA and/or RNA.

[2123] Any of the assays described herein may involve providing a biological sample from the patient as the source of patient DNA for methylation analysis.

[2124] Any of the assays described herein may involve obtaining patient DNA from a biological sample which has previously been obtained from the patient.

[2125] Any of the assays described herein may involve obtaining a biological sample from the patient as the source of patient DNA for methylation analysis. The sample may be self-collected or collected by any suitable medical professional. Procedures for obtaining a biological sample include biopsy.

[2126] Methods for sample isolation and for the subsequent extraction and isolation of DNA from such cell or tissue samples in preparation for assessing DNA methylation, are well known to those skilled in the art. In the context of the assays or methods described herein, the entirety of a sample may be used, or alternatively cells may be concentrated or cell types may be fractionated in order to only apply subsets of one or more cell types to the present assays or methods. Any suitable methods of concentration or fractionation may be used.

### Types of Cancers

[2127] The methods described herein may be applied to any cancer. Preferably, the methods described herein may be applied to cervical cancer and/or endometrial cancer, particularly cervical cancer. The methods described herein are most preferably applied to cervical cancer.

[2128] The cancer may be a primary cancer lesion. The cancer may be a secondary cancer lesion. The cancer may be a metastatic lesion.

[2129] In assays described herein, wherein the assay is for assessing the presence, absence or development of grade 3 cervical epithelial neoplasia (CIN3) and/or cervical cancer, the cervical cancer may preferably be a squamous cell cancer, an adenocarcinoma or an adenosquamous carcinoma. Any of the assays described herein may additionally, or alternatively, be for assessing the presence, absence or development of endometrial cancer.

[2130] In assays described herein, wherein the assay is for assessing the presence, absence or development of endometrial cancer, the endometrial cancer may preferably be endometroid cancer, uterine carcinosarcoma, squamous cell carcinoma, small cell carcinoma, transitional carcinoma, serous carcinoma, clear-cell carcinoma, mucinous adenocarcinoma, undifferentiated carcinoma, dedifferentiated carcinoma or serous adenocarcinoma.

### Arrays and Kits

[2131] The invention also encompasses arrays capable of discriminating between methylated and non-methylated forms of CpGs as defined herein; the arrays may comprise oligonucleotide probes specific for methylated forms of CpGs as defined herein and oligonucleotide probes specific for non-methylated forms of CpGs as defined herein.

[2132] In any of the arrays described herein, the array may comprise oligonucleotide probes specific for a methylated form of each CpG in a CpG panel and oligonucleotide probes specific for a non-methylated form of each CpG in the panel; wherein the panel consists of at least 500 CpGs selected from the CpGs identified in SEQ ID NOs 1 to 5418.

[2133] The panel may consist of at least 500 CpGs selected from the CpGs identified in SEQ ID NOs 1 to 5418, preferably wherein the CpGs comprise the CpGs identified in SEQ ID NOs 1 to 500.

[2134] The panel may consist of at least 1000 CpGs selected from the CpGs identified in SEQ ID NOs 1 to 5418, preferably wherein the CpGs comprise the CpGs identified in SEQ ID NOs 1 to 1000.

[2135] The panel may consist of at least 1500 CpGs selected from the CpGs identified in SEQ ID NOs 1 to 5418, preferably wherein the CpGs comprise the CpGs identified in SEQ ID NOs 1 to 1500.

[2136] The panel may consist of at least 2000 CpGs selected from the CpGs identified in SEQ ID NOs 1 to 5418, preferably wherein the CpGs comprise the CpGs identified in SEQ ID NOs 1 to 2000.

[2137] The panel may consist of at least 2500 CpGs selected from the CpGs identified in SEQ ID NOs 1 to 5418, preferably wherein the CpGs comprise the CpGs identified in SEQ ID NOs 1 to 2500.

[2138] The panel may consist of at least 3000 CpGs selected from the CpGs identified in SEQ ID NOs 1 to 5418, preferably wherein the CpGs comprise the CpGs identified in SEQ ID NOs 1 to 3000.

[2139] The panel may consist of at least 3500 CpGs selected from the CpGs identified in SEQ ID NOs 1 to 5418, preferably wherein the CpGs comprise the CpGs identified in SEQ ID NOs 1 to 3500.

[2140] The panel may consist of at least 4000 CpGs selected from the CpGs identified in SEQ ID NOs 1 to 5418, preferably wherein the CpGs comprise the CpGs identified in SEQ ID NOs 1 to 4000.

[2141] The panel may consist of at least 4500 CpGs selected from the CpGs identified in SEQ ID NOs 1 to 5418, preferably wherein the CpGs comprise the CpGs identified in SEQ ID NOs 1 to 4500.

[2142] The panel may consist of at least 5000 CpGs selected from the CpGs identified in SEQ ID NOs 1 to 5418, preferably wherein the CpGs are the CpGs identified in SEQ ID NOs 1 to 5000.

[2143] The panel may consist of all CpGs identified in SEQ ID NOs 1 to 5000 and identified at nucleotide positions 61 to 62, and identified in SEQ ID NOs 5001 to 5418 and denoted by CG.

[2144] In some embodiments the array is not an Infinium MethylationEPIC BeadChip array or an Illumina Infinium HumanMethylation450 BeadChip array.

[2145] Separately or additionally, in some embodiments the number of CpG-specific oligonucleotide probes of the array is 482,000 or less, 480,000 or less, 450,000 or less, 440,000 or less, 430,000 or less, 420,000 or less, 410,000 or less, or 400,000 or less, 375,000 or less, 350,000 or less, 325,000 or less, 300,000 or less, 275,000 or less, 250,000 or less, 225,000 or less, 200,000 or less, 175,000 or less, 150,000 or less, 125,000 or less, 100,000 or less, 75,000 or less, 50,000 or less, 45,000 or less, 40,000 or less, 35,000 or less, 30,000 or less, 25,000 or less, 20,000 or less, 15,000 or less, 10,000 or less, 5,000 or less, 4,000 or less, 3,000 or less or 2,000 or less.

[2146] The CpG panel may comprise any set of CpGs defined in the assays of the invention described herein.

[2147] The arrays of the invention may comprise one or more oligonucleotides comprising any set of CpGs defined in the assays of the invention, wherein the one or more oligonucleotides are hybridized to corresponding oligonucleotide probes of the array.

[2148] The invention also encompasses a process for making a hybridized array described herein, comprising contacting an array according to the present invention with a group of oligonucleotides comprising any set of CpGs defined in the assays of the invention.

[2149] Any of the arrays as defined herein may be comprised in a kit. The kit may comprise any array as defined herein together with instructions for use.

[2150] The invention further encompasses the use of any of the arrays as defined herein in any of the assays for determining the methylation status of CpGs for the purposes of predicting the presence or development of cancer in an individual.

[2151] The following Examples serve to illustrate but not to limit the invention.

### Examples

[2152] In the Examples described herein, WID-CIN-Index is a cancer index value wherein the index value has been determined by assaying in a population of DNA molecules derived from a given sample from an individual the methylation status of a panel of CpGs selected from the CpGs identified in SEQ ID NOs 1 to 5000 and/or within Differentially Methylated Regions defined by SEQ ID NOs 5001 to 5418.

[2153] In some instances within the Examples, all CpGs defined by SEQ ID NOs: 1 to 5000 have been included in the panel which has been assayed to obtain a cancer index value. In addition, specific sub-selections of CpGs from among the 500 CpGs defined by SEQ ID NOs: 1 to 500 have been included in the panel which has been assayed to obtain a cancer index value. In these instances, the cancer index value's ability to discriminate between CIN3 and/or cancer positive and CIN3 and/or cancer negative women is described, wherein discriminatory ability of the index is characterised by AUC and received operating characteristics.

[2154] Cervical screening is currently transitioning from cytology to HPV-testing. This will lead to increased sensitivity but decreased specificity in mass screening. An objective, automatable test that can accurately triage HPV+ve women independently of sample heterogeneity and age, while also capable of detecting other epithelial uterine cancers is urgently required. The inventors, along with other scientists, have shown the feasibility of utilising DNA methylation markers to identify women with pre-invasive or invasive cancers. The clinical use of DNA methylation markers to identify women at high risk for CIN3+ has been hindered by several factors:
[2155] (i) A suboptimal sensitivity in detecting CIN3 or CIN 3+, particularly in young women below 30 who have a substantially higher prevalence of HPV and thus have an increased need for high performance triage testing. For instance, the GynTect test (which utilises DNA methylation of six genes) has a sensitivity for CIN3 at 35% in <30 year old and 76% in ≥30 year old women and the sensitivity in detecting CIN3+ for the QIAsure (which uses methylation of two genes) at 37.5% in <30 year old and 89.3% in ≥30 year old women, who were referred with an abnormal cytology.
[2156] (ii) A low specificity, which is also age dependent and comparable to cytology which ranges from 76.6% in ≥30 year old women to 87.8% in <30 year old women.
[2157] (iii) A lack of data prevents judgement as to whether a DNA methylation marker or marker panel is capable of identifying HPV+ve women which, despite being cytology-ye at the time of assessment, go on to develop CIN3+ in succeeding years.

[2158] Using a cohort-based nested case-control setting, the inventors aimed to develop and validate a DNA methylation signature (called Women's cancer risk IDentification CIN3 index, WID-CIN3-index) in cervical liquid-based cytology samples. The cancer index value should be capable of both diagnosing and predicting the future risk of CIN3+.

### Materials and Methods

### Cervical Liquid-based Cytology Sample Collection

[2159] All cervical liquid-based cytology samples processed in the capital region of Stockholm in Sweden are biobanked through a state-of-the-art platform at the Karolinska University Laboratory, Karolinska University Hospital, as previously described (Perskvist et al, 2013). Since the year 2013, virtually 100% of the ˜150 000 LBCs per year are compacted and stored in a 600 microliter, 96 well plate format at −27°. This allows for preservation of intact cells, and analyses of DNA, RNA and protein content, among others. The biobank is linked to the Swedish health register infrastructure through the individually unique personal identification number (PIN) (Ludvigsson et al, 2016).

[2160] The inventors defined a cohort of all women participating in cervical screening, or clinically indicated testing, during the years 2013-2015 and linked this to the National Cancer Register at the Swedish National Board of Health and Welfare, to identify all cases of CIN3 or invasive cervical cancer (CIN3+) occurring in the sample collection during these years (n=samples from n women). The inventors utilized this cohort to identify a) all women with prevalent CIN3+, b) all women with a normal sample which was succeeded by a later diagnosis of CIN3+ within 1-4 years, c) all women with low-grade lesions of the cervix, so-called CIN1-2 and d) an age- and calendar-year of sample frequency-matched control group of healthy women who had no record of cervical lesions in the National Cancer Register ever. During the years 2013-2015, some groups of the population had been randomized to HPV screening and some to primary cytology. The inventors carefully balanced each sample set to reflect this fact. All samples which did not have HPV results on record were put through high-performance HPV-testing on the cobas48000 assay (ref), which had been the publicly tendered HPV testing platform during this entire period. The inventors further linked all samples to comprehensive, harmonized records of their cytology diagnosis held in the National Cervical Screening Register (NKCx.se). This enabled stratification of all samples by high-risk HPV positivity, and cytology status, respectively.

[2161] To maximize DNA content, we, blinded to case-control status, visually screened all eligible vials of biobanked samples to ensure that a visible cell pellet was present. Approximately ⅓ of samples had such a pellet and this was independent of case-control or CIN3/ICC status. The inventors then aliquoted 100 microliter from each sample for UCL to perform methylation analyses.

### Sample Processing and DNA Extraction

[2162] 650 ul of PBS was added to each 100 ul cervical liquid-based cytology sample received from the Karolinska University Laboratory biobank and centrifuged for 15 mins at 4,600 rpm. The supernatant was carefully removed and the pellet was washed with a further 750 ul PBS. The samples were then vortexed and centrifuged again for 15 mins at 4,600 rpm. After careful removal of the second PBS wash the samples the inventors resuspended in lysis buffer from the Nucleo-Mag Blood 200 ul kit (Macherey Nagel, cat #744501.4) which was used in conjunction with the Hamilton Star liquid handling platform for high throughout DNA extraction. DNA concentration and quality absorbance ratios were measured using Nanodrop-8000, Thermoscientific Inc. Extracted DNA was stored at −80° C. until further analysis.

### DNA Methylation Array Analysis

[2163] Cervical was normalised to 10-25 ng/ul and 200-500 ng total DNA was bisulfite modified using the EZ-96 DNA Methylation-Lightning kit (Zymo Research Corp, cat #D5047) on the Hamilton Star Liquid handling platform. 8 ul of modified DNA was subjected to methylation analysis on the Illumina InfiniumMethylation EPIC BeadChip (Illumina, CA, USA) at UCL Genomics according to the manufacturer's standard protocol.

### Methylation Analysis

[2164] All methylation microarray data were processed through the same standardised pipeline. Raw data was loaded using the R package minfi. Any samples with median methylated and unmethylated intensities <9.5 were removed. Any probes with a detection p-value >0.01 were regarded as failed. Any samples with >10% failed probes, and any probes with >10% failure rate were removed from the dataset. Beta values from failed probes (approximately 0.001% of the dataset) were imputed using the impute.knn function as part of the impute R package.

[2165] Non-CpG probes (2,932), SNP-related probes as identified by Zhou et. al. (82,108), and chrY probes were removed from the dataset. An additional 6,102 previously identified probes that followed a trimodal methylation pattern characteristic of an underlying SNP were removed. Background intensity correction and dye bias correction was performed using the minfi single sample preprocessNoob function. Probe bias correction was performed using the beta mixture quantile normalisation (BMIQ) algorithm.

[2166] The fraction of immune cell contamination, and the relative proportions of different immune cell subtypes in each sample, were estimated using the EpiDISH algorithm using the epithelial, fibroblast and immune cell reference dataset. The top 1,000 most variable probes (ranked by standard deviation) were used in a principal component analysis. Statistical tests were performed in order to identify any anomalous associations between plate, sentrix position, date of array processing, date of DNA creation, study centre, immune contamination fraction, age, type (case versus control) and the top ten principal components. No anomalous associations were found.

### Methylight Reaction Design

[2167] Two ranked lists of CpGs were generated. The first was ranked according to the epithelial delta-beta estimates (the estimated difference in methylation between cases and controls in cervical epithelial cells). The second was ranked according to p-values (derived from a linear model comparing cases to controls after adjustment for immune cell proportion and age). For each CpG we identified any contiguous CpGs within +/−500 bp. The inventors computed and plotted the mean methylation in cases and controls across all CpGs within this 1000 bp region. Upon visual inspection of the top 50 CpGs (in both ranked lists) we identified a number of candidate regions according to the following criteria:
[2168] 1. Regions where the methylation level was close to zero in healthy controls.
[2169] 2. Regions where the variability within controls was relatively low.
[2170] 3. Regions where the methylation level was elevated in cases.
[2171] 4. Regions that included two or more CpG sites

### Statistical Analyses for Classifier Development

[2172] Contamination by immune cells presented a challenge with respect to the identification of differentially methylated positions (DMPs) as differential methylation that occurred solely in epithelial cells was diminished in samples with high IC and vice versa. In order to overcome this, the inventors linearly regressed the beta values on IC for each CpG site, the linear models being fitted to cases and controls separately. The intercept points at IC=0 were used as estimates of mean beta values in cases and controls in a pure epithelial cell population. The difference between these intercept points provided a delta-beta estimate in epithelial cells. The difference between intercept points at IC=1 provided immune cell delta-beta estimates.

[2173] The R package glmnet was used to train classifiers with a mixing parameter value of alpha=0 (ridge penalty) and alpha=1 (lasso penalty) with binomial response type. Data from the discovery set dataset were used to fit the classifiers. A ranked list of CpGs was generated by taking the CpG with the largest epithelial delta-beta, followed by the CpG with the largest immune delta-beta, followed by the next largest epithelial delta-beta and so forth (any duplicates were removed). The top n CpGs from the list of ranked CpGs were used as inputs to the classifier. Ten-fold cross-validation was used inside the training set by the cv.glmnet function in order to determine the optimal value of the regularisation parameter lambda. The AUC was used as a metric of classifier performance. Out-of-bag AUC estimates (based on the cross validation folds which were not used for training the classifier) were as a function of n, the number of CpGs used as inputs during training. The maximum value of n was 10,000.

[2174] The optimal classifier was selected based on the highest out-of-bag AUC obtained on the discovery set. Once the classifier was finalised it was then applied to the validation datasets.

[2175] Denoting the top n CpGs as β₁, . . . , βₙ and the regression coefficients from the trained classifier as w₁, . . . , wₙ then WID-CIN-index=Σᵢ₌₁ⁿ(wᵢβᵢ−μ)/σ where μ and a are defined as the mean and standard deviation of the quantity Σᵢ₌₁ⁿwᵢβᵢ in the discovery set (that is, the index is scaled to have zero mean and unit standard deviation in the discovery set). The island (open sea) subcomponent was obtained by restricting the above sum to CpGs located in CpG islands (open seas) as defined in the Illumina manifest version B4.

### Example

### Sample Heterogeneity and Differential Methylation

[2176] For the Discovery Set (FIG. 1), the inventors identified cervical liquid-based cytology samples from 169 cytology+ve women (164 HPV+ve and 5 HPV-ve) at the time of cervical intraepithelial neoplasia (CIN) grade 3 (n=154) or invasive cancer (n=6) diagnosis (CIN3+) and age- and calendar year-matched HPV+ve cytology-ye women (n=202) from the Karolinska Institute population-based cervical cytology biobank.

[2177] Previously the inventors found that methylation differences may vary due to immune cell type composition in cases compared to controls. Hence, the inventors assessed the level of cell type heterogeneity in each cervical cytology sample using EpiDISH, an algorithm that infers the relative proportion of epithelial cells, fibroblasts, and seven subtypes of immune cells in each sample. The cell-type distributions were broadly similar between CIN3+ cases and controls with an increase in immune cells in CIN2 and CIN3+ cases (FIG. 6a).

[2178] Assessing 850,000 CpG sites after false discovery rate adjustment the inventors found 158,434 CpGs to be significantly differentially methylated between CIN3+ cases and controls (FIG. 6b) with the main difference based on epithelial cells and with a skew towards hypermethylation in CIN3+ cases (FIG. 6c).

### Development of Discriminatory Index

[2179] In order to derive a diagnostic methylation signature to detect CIN3 or invasive cervical cancer, termed the WID-CIN-index, the inventors used ridge and lasso classifiers in the Discovery Set to classify individuals as CIN3+ cases or controls. The area under the receiver operator characteristic curve (AUC) was used as a measure of predictive performance. CpGs were ranked according to the delta-beta between CIN3+ cases and controls.

[2180] Predictive performance was estimated based on 10-fold cross-validation within the Discovery Set and evaluated as a function of the number of CpGs used to train the classifier. The optimal Discovery Set AUC of 0.98 was achieved using 5,000 CpGs with ridge regression (FIG. 6d). The classifier was developed entirely using the Discovery Set before it was applied to the validation datasets.

[2181] The inventors found that the index was enriched for Open Sea regions and depleted for CpG islands (FIG. 6e). Ridge regression combines information from all input CpGs in contrast to lasso regression, which typically selects a small subset of inputs. Ridge regression offered consistently superior performance suggesting that the discriminatory signal was most robustly extracted by combining a large number of signals from multiple CpG sites.

### Validation of the Diagnostic Capacity of the WID-Test

[2182] In order to assess the diagnostic capacity of the WID-test the inventors analysed an independent dataset of cervical cytology samples consisting of 87 women who were diagnosed with CIN3+ and 111 HPV+ controls (see FIG. 1). The WID-CIN3-index was computed for each woman (FIG. 2a) resulting in an AUC of 0.92 (95% CI: 0.88-0.96) (FIG. 2b). At 75% and 90% specificity, the sensitivity was 90% and 78%, respectively. Discriminatory performance was independent of immune cell proportion (FIG. 7a). Due to the fact that the WID-CIN3+-index shows an age-dependency (FIG. 7b), the inventors assessed ≤30 and >30 year old women separately. The performance of the WID-CIN test was better in >30 year old women (AUC 0.95; 95% CI 0.91-0.99) compared to women ≤30 years (AUC 0.87; 95% CI 0.78-0.95) (FIG. 2b). The inventors further validated the diagnostic validity of the WID-CIN test in the context of HPV-ve/Cytology-ve controls and received a similar performance (FIG. 7c).

[2183] The fact that almost all CIN3+ cases would have been correctly classified (irrespective of the age) at a specificity of 50% (FIG. 2b) suggests a clear superiority of the WID-CIN test over cytology. In order to assess whether the WID-CIN test is also superior when only assessed in Cytology+ve women and whether it is specific for CIN3+ or whether it would also detect HPV+ve/Cytology+ve women who—on colposcopic assessment and cervical biopsy—present with CIN1 or CIN2, the inventors analysed 256 Cytology+ve samples of which 166 and 90 transpired to be CIN1 and CIN2 on biopsy, respectively (FIG. 2c). The inventors applied a cutoff that led to a 100% sensitivity for CIN3+(i.e. −0.60 and −0.56 for <30 and ≥30 year old women, respectively) which led to a true negative rate of 39.5% and 32.8, respectively (FIG. 5a), indicating that up to 40% of Cytology+ve women would have not required a colposcopic assessment or a biopsy. Whereas conventional cytology in HPV+ve women leads to a sensitivity/specificity of 52%/75%, the p16/Ki-67 dual-stained cytology results in a substantially improved performance (75%/74%). Setting the sensitivity to detect CIN3+ cases at 75% and including all HPV+ve women in our diagnostic sets, this led to a specificity of 93.7% overall and to 80% and 97.5% in <30 and ≥30 year old women, respectively (FIG. 5b).

### Validation of the Predictive Capacity of the WID-Test

[2184] In order to optimise the efficacy of the screening, not only is it important to identify women with current CIN3+ but also those women with the highest risk of developing CIN3+ in the future. In order to address this, the inventors analysed 428 HPV+ve/Cytology-ve women of whom 210 were diagnosed with CIN3+1 to 4 years after they provided their sample and 218 remained disease-free within the same period (FIG. 1). Sample cell-type composition was broadly comparable to the Discovery Set (FIG. 8a). For the observation period to be of a satisfactory duration, the inventors selected samples from women that had provided samples early on and had been followed up for four years and hence these samples had been stored longer in the biobank compared to those samples used for the discovery and diagnostic validation. Interestingly, the longer storage time significantly reduced the WID-CIN-index (FIG. 3a; p=0.044), making it impossible to apply the same WID-CIN-index cutoffs as chosen in the previous set. Nevertheless, the WID-CIN-index was elevated in these Cytology-ye samples up to four years prior to the CIN3+ diagnosis (FIG. 3b) with an overall AUC of 0.70 (95% CI: 0.65-0.75) (FIG. 3c). As in the diagnostic set, the performance was better for women >30 years old (AUC 0.78; 95% CI 0.72-0.84) compared to women ≤30 years (AUC 0.63; 95% CI 0.55-0.7) (FIG. 3c, 8b).

### Comparison of Performance of Island and Open-Sea CpGs

[2185] Although the number of island CpGs was under-represented (i.e. only 702 of the 5,000 CpGs were island CpGs), these CpGs carried the highest weight in the WID-CIN-index. Hence, the inventors decomposed the WID-CIN-index into a subcomponent based only on the 702 CpG islands and a subcomponent based on the 3,411 open sea CpGs. The island subcomponent provided an extremely strong signal that corresponded to an AUC of 0.87 in the diagnostic validation set (FIG. 9a,b). It also validated robustly in the predictive validation set with an AUC of 0.67 (FIG. 9c,d). In contrast, the open sea subcomponent consisted of a comparatively weaker signal (AUC of 0.76 in the diagnostic validation set; FIG. 9e,f) which was almost completely lost in the predictive validation set, presumably due to the storage related degradation (FIG. 9g,h).

### Capacity to Detect Endometrial Cancer

[2186] Both the cervical and endometrial epithelium form part of the Müllerian Duct system. Hence, in order to assess whether a woman with a WID-CIN-index positive result, who on colposcopic assessment has no abnormality on her cervix, has an underlying endometrial cancer, the inventors assessed the WID-CIN-index in cervical cytology samples from 217 women with endometrial cancer and 869 healthy controls. The endometrial cancers had a cell-type composition that was broadly similar to the Discovery Set (FIG. 10a). The inventors found that the WID-CIN-test can also identify women with endometrial cancer with a very high accuracy (AUC 0.88; 95% CI: 0.85-0.91). The test was largely independent of age (FIG. 10b) and had an AUC of 0.85 (95% CI 0.81-0.89) for women ≤60 years of age and an AUC of 0.85 (95% CI 0.79-0.91) for older women (FIG. 4b).

### Cancer Index Values and Clinical Actions

[2187] Four sub-groups defined by ranges of cancer index values are specified in Table 9 as corresponding to preferred clinical actions, comprising intensified screening, administration of therapeutics and surgery. The subgroups are based on control samples from the internal validation set. That is, these values of the index split the control samples into four equally sized groups. Odds ratio values are calculated by comparing the number of cases and controls in a given quartile to the first quartile (which is taken as a reference). Odds ratio values are determined for CIN3 risk and endometrial cancer risk. For example, a woman in the fourth quartile is roughly 104 times more likely to have CIN3 than a woman in the first quartile, and approximately 40 times more likely to have endometrial cancer than a woman in the first quartile.

### Discussion

[2188] In general, cervical cancer screening is one of the foremost success stories in medicine and oncology in particular. Here the inventors have provided extensive evidence that an objective DNA methylation signature, the WID-CIN-test, outperforms cytology as a tool to triage HPV+ve women. The inventors have demonstrated that the WID-CIN test (i) reduces the number of false positive HPV+ women by 50%, (ii) does not identify women with CIN1 and only half of women with CIN2 (i.e. likely those which progress to CIN3+ if not treated before), (iii) is able—despite the cytology being negative—to identify HPV+ve women which present with a CIN3+ up to four years later, and (iv) is able to also identify the majority of women with endometrial cancer.

[2189] Whereas a plethora of DNA methylation markers have been identified and assessed in cervical liquid-based cytology samples and deemed to be promising only a small number of studies assessed the clinical validity of these markers in a screening setting. Using DNA methylation levels of a combination of two genes (i.e. MAL and miR-124-2), Verhoef et al demonstrated in a prospective clinical trial that triaging HPV+ve women with DNA methylation somehow lowers sensitivity (67.5%) compared to cytology-triaging (74.8%) and required almost twice as many colposcopy referrals. As this study was performed on women aged 33 years or older, the performance of these methylation markers would have been worse in younger women. Although the inventors also observed this age-dependent performance in the WID-test, in young women the sensitivity was 80% at a 75% specificity.

[2190] To date, the considerable heterogeneity of cervical liquid-based cytology samples has been entirely underappreciated (specifically at the level of DNA which includes DNA from cell-debris not visible at the microscopic level when assessing cytology), their high variability of epithelial and immune cell proportion ranging from almost no immune cells to samples which almost exclusively consist of immune cells. The inventors have thoroughly assessed and concluded that the WID-test performance is independent of sample heterogeneity and hence, likely to perform equally well in self-collected samples.

[2191] Our observation that the WID-test is able to identify HPV+ve women who show no abnormal cells in their cervical liquid-based cytology sample but develop CIN3+ up to four years later might suggest that the WID-test is not only reflective of an epigenetic cancer program, but may in fact be reflective of an individual predisposition to progress to a cervical (pre-)cancer upon infection with HPV. In order to test this hypothesis, samples from women prior to HPV-infection will need to be analysed in order to assess whether the WID-test would have predicted the disease development even before the presence of the carcinogen.

[2192] Here the inventors have demonstrated the unprecedented performance of a DNA methylation classifier—the WID-CIN-test—in identifying HPV+ve women with or at risk of CIN3+. The fact that the test not only identifies women with CIN3+(and equally as well when making comparisons to HPV+ve or HPV-ve women) but also women with endometrial cancer strongly suggests that the WID-CIN-test be rapidly introduced and implemented in the clinical arena.

TABLE 9

| | WID- | CIN3 or | | |
|---|---|---|---|---|
| | CIN- | invasive | | |
| | index | cervical cancer | Endometrial | |
| | range | risk | cancer risk | Clinical Action |
| WID-CIN index (cutpoint for | (−1.17, | 1.00 | 1.00 | no clinical action, repeat of cervical smear in 1 year for HPV positive |
| <50% specificity) | −0.53) | (reference) | (reference) | women and in 3 years for HPV negative women |
| WID-CIN index (cutpoint for | (−0.53, | 3.99 | 4.7 | no immediate clinical action, repeat of cervical smear in 1 year |
| 50%-75% specificity) | −0.33) | (0.94, 21.29) | (2.65,8.2) | |
| WID-CIN index (cutpoint for | (−0.33, | 10.29 | 5.89 | Immediate colposcopy for HPV positive women and repeat cervical smear |
| 75%-90% specificity) | −0.17) | (2.74, 52.77) | (2.73, 12.04) | in 1 year for HPV negative women; Asessment of endometrium in case |
| | | | | colposcopy is negative |
| WID-CIN index (cutpoint for | (−0.17, | 103.97 | 40.44 | Immediate colposcopy irrespective of HPV-status; Immediate endometrial |
| >90 specificity) | 0.77) | (31.61, 498.89) | (26.22, 64) | biopsy and hysteroscopy if colposcopy is negative |
| CLEC14A_i | | PMR >5 | PMR >5 | Immediate colposcopy; if colpsocopy negative then endometrial biopsy; if |
| | | | | both negative repeat test in 1 year |
| CLVS2_ii | | PMR >1 | PMR >1 | Immediate colposcopy; if colpsocopy negative then endometrial biopsy; if |
| | | | | both negative repeat test in 1 year |
| DPP6_i | | PMR >2 | PMR >2 | Immediate colposcopy; if colpsocopy negative then endometrial biopsy; if |
| | | | | both negative repeat test in 1 year |
| ELAVL4_i | | PMR >5 | PMR >5 | Immediate colposcopy; if colpsocopy negative then endometrial biopsy; if |
| | | | | both negative repeat test in 1 year |
| FUT9_ii | | PMR >4 | PMR >4 | Immediate colposcopy; if colpsocopy negative then endometrial biopsy; if |
| | | | | both negative repeat test in 1 year |
| GALR1_i 9 | | PMR >4 | PMR >4 | Immediate colposcopy; if colpsocopy negative then endometrial biopsy; if |
| | | | | both negative repeat test in 1 year |
| GSX1_iii | | PMR >1 | PMR >1 | Immediate colposcopy; if colpsocopy negative then endometrial biopsy; if |
| | | | | both negative repeat test in 1 year |
| KCNIP4_i | | PMR >1 | PMR >1 | Immediate colposcopy; if colpsocopy negative then endometrial biopsy; if |
| | | | | both negative repeat test in 1 year |
| LHX8_i | | PMR >4 | PMR >4 | Immediate colposcopy; if colpsocopy negative then endometrial biopsy; if |
| | | | | both negative repeat test in 1 year |
| LINC00403_i | | PMR >4 | PMR >4 | Immediate colposcopy; if colpsocopy negative then endometrial biopsy; if |
| | | | | both negative repeat test in 1 year |
| LINC00403_iv | | PMR >4 | PMR >4 | Immediate colposcopy; if colpsocopy negative then endometrial biopsy; if |
| | | | | both negative repeat test in 1 year |
| MDGA_I | | PMR >5 | PMR >5 | Immediate colposcopy; if colpsocopy negative then endometrial biopsy; if |
| | | | | both negative repeat test in 1 year |
| MHC_ii | | PMR >2 | PMR >2 | Immediate colposcopy; if colpsocopy negative then endometrial biopsy; if |
| | | | | both negative repeat test in 1 year |
| MSC_ii | | PMR >1 | PMR >1 | Immediate colposcopy; if colpsocopy negative then endometrial biopsy; if |
| | | | | both negative repeat test in 1 year |
| NET01_i | | PMR >5 | PMR >5 | Immediate colposcopy; if colpsocopy negative then endometrial biopsy; if |
| | | | | both negative repeat test in 1 year |
| NID2_i | | PMR >5 | PMR >5 | Immediate colposcopy; if colpsocopy negative then endometrial biopsy; if |
| | | | | both negative repeat test in 1 year |
| NTM_ii | | PMR >0 | PMR >0 | Immediate colposcopy; if colpsocopy negative then endometrial biopsy; if |
| | | | | both negative repeat test in 1 year |
| PDEIC_ii | | PMR >4 | PMR >4 | Immediate colposcopy; if colpsocopy negative then endometrial biopsy; if |
| | | | | both negative repeat test in 1 year |
| RALYL_ii | | PMR >2 | PMR >2 | Immediate colposcopy; if colpsocopy negative then endometrial biopsy; if |
| | | | | both negative repeat test in 1 year |
| RBFOX_i | | PMR >7 | PMR >7 | Immediate colposcopy; if colpsocopy negative then endometrial biopsy; if |
| | | | | both negative repeat test in 1 year |
| RCN1_i | | PMR >6 | PMR >6 | Immediate colposcopy; if colpsocopy negative then endometrial biopsy; if |
| | | | | both negative repeat test in 1 year |
| REG39_i | | PMR >5 | PMR >5 | Immediate colposcopy; if colpsocopy negative then endometrial biopsy; if |
| | | | | both negative repeat test in 1 year |
| RNF291_ii | | PMR >6 | PMR >6 | Immediate colposcopy; if colpsocopy negative then endometrial biopsy; if |
| | | | | both negative repeat test in 1 year |
| RP4_ii | | PMR >6 | PMR >6 | Immediate colposcopy; if colpsocopy negative then endometrial biopsy; if |
| | | | | both negative repeat test in 1 year |
| RYR2_i | | PMR >5 | PMR >5 | Immediate colposcopy; if colpsocopy negative then endometrial biopsy; if |
| | | | | both negative repeat test in 1 year |
| SERTM1_ii | | PMR >2 | PMR >2 | Immediate colposcopy; if colpsocopy negative then endometrial biopsy; if |
| | | | | both negative repeat test in 1 year |
| ZIC4 | | PMR >7 | PMR >7 | Immediate colposcopy; if colpsocopy negative then endometrial biopsy; if |
| | | | | both negative repeat test in 1 year |
| ZNF536_ii | | PMR >3 | PMR >3 | Immediate colposcopy; if colpsocopy negative then endometrial biopsy; if |
| | | | | both negative repeat test in 1 year |

TABLE 10

| | | | | | | | | | | | | | Amp- | | | | | | |
|---|---|---|---|---|---|---|---|---|---|---|---|---|---|---|---|---|---|---|---|
| | | | | | | | | | | | | | licon | | | | | | |
| | | | | Spec- | Sen- | | | | | | | | se- | | | | | | |
| | | | | i- | si- | ML | | Chro- | | | | Amp- | quence | F | F | R | R | | |
| Rxn | Gene | | Cut- | fic- | tiv- | design | DNA | mo- | Rxn | Rxn | Amplicon | licon. | 5′ to | Primer | Primer | Primer | Primer | Probe. | Probe. |
| name | name | auc | off | ity | ity | region | strand | some | Start | Finish | Location | Length | 3′ | Start | Finish | Start | Finish | Start | Finish |
| DPP6_i | DPP6 | 0.95 | 0 | 0.75 | 0.86 | chr7: | posi- | 7 | 1535840 | 1535840 | chr7: | 72 | TCAC | 1535840 | 1535840 | 1535840 | 1535840 | 1535840 | 1535840 |
| | | | | | | 153583701- | tive | | 08 | 79 | 153584008- | | [[CG]] | 08 | 34 | 60 | 79 | 42 | 58 |
| | | | | | | 153584375 | | | | | 153584079 | | TAGTGC | | | | | | |
| | | | | | | | | | | | | | TTGTTT | | | | | | |
| | | | | | | | | | | | | | GTGGAA | | | | | | |
| | | | | | | | | | | | | | GC[CG] | | | | | | |
| | | | | | | | | | | | | | AG[CG] | | | | | | |
| | | | | | | | | | | | | | TG | | | | | | |
| | | | | | | | | | | | | | [[CG]] | | | | | | |
| | | | | | | | | | | | | | TG | | | | | | |
| | | | | | | | | | | | | | [[CG]] | | | | | | |
| | | | | | | | | | | | | | C | | | | | | |
| | | | | | | | | | | | | | [[CG]] | | | | | | |
| | | | | | | | | | | | | | [[CG]] | | | | | | |
| | | | | | | | | | | | | | [[CG]] | | | | | | |
| | | | | | | | | | | | | | [[CG]] | | | | | | |
| | | | | | | | | | | | | | CACCCA | | | | | | |
| | | | | | | | | | | | | | GTCCAG | | | | | | |
| | | | | | | | | | | | | | [[CG]] | | | | | | |
| | | | | | | | | | | | | | [[CG]] | | | | | | |
| | | | | | | | | | | | | | GAGTGG | | | | | | |
| | | | | | | | | | | | | | G | | | | | | |
| CLEC14A_i | CLEC14A | 0.92 | 3.82 | 0.75 | 0.9 | chr14: | posi- | 14 | 387245 | 387246 | chr14: | 83 | T | 387245 | 387246 | 387246 | 387246 | 387246 | 387246 |
| | | | | | | 38724342- | tive | | 96 | 78 | 38724596- | | [[CG]] | 96 | 20 | 58 | 78 | 32 | 55 |
| | | | | | | 38725008 | | | | | 38724678 | | GTCCCA | | | | | | |
| | | | | | | | | | | | | | GGTGGA | | | | | | |
| | | | | | | | | | | | | | CTGAAG | | | | | | |
| | | | | | | | | | | | | | TCCAGA | | | | | | |
| | | | | | | | | | | | | | G[CG]G | | | | | | |
| | | | | | | | | | | | | | [CG]CT | | | | | | |
| | | | | | | | | | | | | | GTGCAG | | | | | | |
| | | | | | | | | | | | | | CTGGAA | | | | | | |
| | | | | | | | | | | | | | GGG | | | | | | |
| | | | | | | | | | | | | | [[CG]] | | | | | | |
| | | | | | | | | | | | | | [[CG]] | | | | | | |
| | | | | | | | | | | | | | [[CG]] | | | | | | |
| | | | | | | | | | | | | | ATAGCT | | | | | | |
| | | | | | | | | | | | | | CAAGTT | | | | | | |
| | | | | | | | | | | | | | AGAGG | | | | | | |
| | | | | | | | | | | | | | [[CG]] | | | | | | |
| | | | | | | | | | | | | | GCCC | | | | | | |
| | | | | | | | | | | | | | [[CG]] | | | | | | |
| | | | | | | | | | | | | | GG | | | | | | |
| RALYL_ii | RALYL | 0.93 | 0.03 | 0.75 | 0.88 | chr8: | nega- | 8 | 850954 | 850955 | chr8: | 89 | CCTGCT | 850955 | 850955 | 850954 | 850955 | 850955 | 850955 |
| | | | | | | 85095225- | tive | | 92 | 80 | 85095492- | | [[CG]] | 56 | 80 | 92 | 17 | 20 | 41 |
| | | | | | | 85095824 | | | | | 85095580 | | TCTGGG | | | | | | |
| | | | | | | | | | | | | | CTCACA | | | | | | |
| | | | | | | | | | | | | | G | | | | | | |
| | | | | | | | | | | | | | [[CG]] | | | | | | |
| | | | | | | | | | | | | | AAGGCA | | | | | | |
| | | | | | | | | | | | | | GCCT | | | | | | |
| | | | | | | | | | | | | | [[CG]] | | | | | | |
| | | | | | | | | | | | | | C | | | | | | |
| | | | | | | | | | | | | | [[CG]] | | | | | | |
| | | | | | | | | | | | | | [[CG]] | | | | | | |
| | | | | | | | | | | | | | AGCTGC | | | | | | |
| | | | | | | | | | | | | | [[CG]] | | | | | | |
| | | | | | | | | | | | | | CTGC | | | | | | |
| | | | | | | | | | | | | | [CG]CT | | | | | | |
| | | | | | | | | | | | | | GCTGC | | | | | | |
| | | | | | | | | | | | | | [CG]CC | | | | | | |
| | | | | | | | | | | | | | ACTGGT | | | | | | |
| | | | | | | | | | | | | | GTTGC | | | | | | |
| | | | | | | | | | | | | | [[CG]] | | | | | | |
| | | | | | | | | | | | | | CTCTCA | | | | | | |
| | | | | | | | | | | | | | GG | | | | | | |
| | | | | | | | | | | | | | [[CG]] | | | | | | |
| | | | | | | | | | | | | | C | | | | | | |
| MSC_ii | MSC | 0.91 | 0.47 | 0.75 | 0.85 | chr8: | nega- | 8 | 727562 | 727563 | chr8: | 82 | CTCCTC | 727563 | 727563 | 727562 | 727562 | 727562 | 727563 |
| | | | | | | 72755932- | tive | | 67 | 48 | 72756267- | | TGC | 24 | 48 | 67 | 92 | 97 | 22 |
| | | | | | | 72756681 | | | | | 72756348 | | [[CG]] | | | | | | |
| | | | | | | | | | | | | | A | | | | | | |
| | | | | | | | | | | | | | [[CG]] | | | | | | |
| | | | | | | | | | | | | | AGTTGT | | | | | | |
| | | | | | | | | | | | | | CACTGG | | | | | | |
| | | | | | | | | | | | | | G[CG]A | | | | | | |
| | | | | | | | | | | | | | GG | | | | | | |
| | | | | | | | | | | | | | [[CG]] | | | | | | |
| | | | | | | | | | | | | | TAGCTG | | | | | | |
| | | | | | | | | | | | | | [[CG]] | | | | | | |
| | | | | | | | | | | | | | CTCTA | | | | | | |
| | | | | | | | | | | | | | [[CG]] | | | | | | |
| | | | | | | | | | | | | | [[CG]] | | | | | | |
| | | | | | | | | | | | | | [[CG]] | | | | | | |
| | | | | | | | | | | | | | GAGGGG | | | | | | |
| | | | | | | | | | | | | | [[CG]] | | | | | | |
| | | | | | | | | | | | | | GCCTCT | | | | | | |
| | | | | | | | | | | | | | TGGAGG | | | | | | |
| | | | | | | | | | | | | | [[CG]] | | | | | | |
| | | | | | | | | | | | | | GGGACC | | | | | | |
| GSX1_iii | GSX1 | 0.93 | 0.02 | 0.78 | 0.75 | chr13: | posi- | 13 | 283667 | 283668 | chr13: | 82 | [[CG]] | 283667 | 283668 | 283668 | 283668 | 283668 | 283668 |
| | | | | | | 28366477- | tive | | 85 | 66 | 28366785- | | CAGAGG | 85 | 02 | 47 | 66 | 10 | 23 |
| | | | | | | 28367151 | | | | | 28366866 | | G | | | | | | |
| | | | | | | | | | | | | | [[CG]] | | | | | | |
| | | | | | | | | | | | | | GGCTGG | | | | | | |
| | | | | | | | | | | | | | CTG | | | | | | |
| | | | | | | | | | | | | | [CG]GG | | | | | | |
| | | | | | | | | | | | | | G | | | | | | |
| | | | | | | | | | | | | | [[CG]] | | | | | | |
| | | | | | | | | | | | | | AC | | | | | | |
| | | | | | | | | | | | | | [[CG]] | | | | | | |
| | | | | | | | | | | | | | [[CG]] | | | | | | |
| | | | | | | | | | | | | | [[CG]] | | | | | | |
| | | | | | | | | | | | | | C | | | | | | |
| | | | | | | | | | | | | | [[CG]] | | | | | | |
| | | | | | | | | | | | | | GGGCCA | | | | | | |
| | | | | | | | | | | | | | TGC | | | | | | |
| | | | | | | | | | | | | | [CG] | | | | | | |
| | | | | | | | | | | | | | [CG]CT | | | | | | |
| | | | | | | | | | | | | | CCTTCC | | | | | | |
| | | | | | | | | | | | | | TGGTGG | | | | | | |
| | | | | | | | | | | | | | ACT | | | | | | |
| | | | | | | | | | | | | | [[CG]] | | | | | | |
| | | | | | | | | | | | | | CTAGTG | | | | | | |
| | | | | | | | | | | | | | CTG | | | | | | |
| | | | | | | | | | | | | | [[CG]] | | | | | | |
| | | | | | | | | | | | | | C | | | | | | |
| ZNF536_ii | ZNF536 | 0.92 | 1.73 | 0.75 | 0.75 | chr19: | nega- | 19 | 308661 | 308662 | chr19: | 85 | GAG | 308662 | 308662 | 308661 | 308662 | 308662 | 308662 |
| | | | | | | 30865857- | tive | | 95 | 79 | 30866195- | | [[CG]] | 61 | 79 | 95 | 14 | 35 | 58 |
| | | | | | | 30866531 | | | | | 30866279 | | GC | | | | | | |
| | | | | | | | | | | | | | [[CG]] | | | | | | |
| | | | | | | | | | | | | | CACTTC | | | | | | |
| | | | | | | | | | | | | | ACCTTA | | | | | | |
| | | | | | | | | | | | | | [CG]GA | | | | | | |
| | | | | | | | | | | | | | GGGGAG | | | | | | |
| | | | | | | | | | | | | | ATAATG | | | | | | |
| | | | | | | | | | | | | | AGATCA | | | | | | |
| | | | | | | | | | | | | | ATTAGA | | | | | | |
| | | | | | | | | | | | | | GG | | | | | | |
| | | | | | | | | | | | | | [[CG]] | | | | | | |
| | | | | | | | | | | | | | C | | | | | | |
| | | | | | | | | | | | | | [[CG]] | | | | | | |
| | | | | | | | | | | | | | TCAC | | | | | | |
| | | | | | | | | | | | | | [[CG]] | | | | | | |
| | | | | | | | | | | | | | [[CG]] | | | | | | |
| | | | | | | | | | | | | | C[CG]G | | | | | | |
| | | | | | | | | | | | | | AGACAG | | | | | | |
| | | | | | | | | | | | | | CTGC | | | | | | |
| | | | | | | | | | | | | | [[CG]] | | | | | | |
| | | | | | | | | | | | | | C | | | | | | |
| | | | | | | | | | | | | | [[CG]] | | | | | | |
| | | | | | | | | | | | | | CA | | | | | | |
| CLVS2_ii | CLVS2 | 0.93 | 0.18 | 0.8 | 0.75 | chr6: | nega- | 6 | 1233174 | 1233175 | chr6: | 95 | [[CG]] | 1233175 | 1233175 | 1233174 | 1233174 | 1233174 | 1233174 |
| | | | | | | 123317188- | tive | | 40 | 34 | 123317440- | | GAC | 10 | 34 | 40 | 58 | 70 | 88 |
| | | | | | | 123317787 | | | | | 123317534 | | [[CG]] | | | | | | |
| | | | | | | | | | | | | | CT | | | | | | |
| | | | | | | | | | | | | | [[CG]] | | | | | | |
| | | | | | | | | | | | | | GGAGAG | | | | | | |
| | | | | | | | | | | | | | CCCCAG | | | | | | |
| | | | | | | | | | | | | | GAGAGG | | | | | | |
| | | | | | | | | | | | | | CCAG | | | | | | |
| | | | | | | | | | | | | | [[CG]] | | | | | | |
| | | | | | | | | | | | | | C | | | | | | |
| | | | | | | | | | | | | | [[CG]] | | | | | | |
| | | | | | | | | | | | | | [[CG]] | | | | | | |
| | | | | | | | | | | | | | CAGCAG | | | | | | |
| | | | | | | | | | | | | | C | | | | | | |
| | | | | | | | | | | | | | [[CG]] | | | | | | |
| | | | | | | | | | | | | | CCC | | | | | | |
| | | | | | | | | | | | | | [CG]CT | | | | | | |
| | | | | | | | | | | | | | G[CG]C | | | | | | |
| | | | | | | | | | | | | | CCACCT | | | | | | |
| | | | | | | | | | | | | | CCC | | | | | | |
| | | | | | | | | | | | | | [CG]GC | | | | | | |
| | | | | | | | | | | | | | TGCTCC | | | | | | |
| | | | | | | | | | | | | | [[CG]] | | | | | | |
| | | | | | | | | | | | | | GAGGGC | | | | | | |
| | | | | | | | | | | | | | TCACAA | | | | | | |
| | | | | | | | | | | | | | AG | | | | | | |
| KCNIP4_i | KCNIP4 | 0.93 | 0.72 | 0.75 | 0.9 | chr4: | posi- | 4 | 219505 | 219505 | chr4: | 62 | GAAG | 219505 | 219505 | 219505 | 219505 | 219505 | 219505 |
| | | | | | | 21950268- | tive | | 35 | 96 | 21950535- | | [[CG]] | 35 | 50 | 72 | 96 | 52 | 69 |
| | | | | | | 21950867 | | | | | 21950596 | | GG | | | | | | |
| | | | | | | | | | | | | | [[CG]] | | | | | | |
| | | | | | | | | | | | | | GGCTGC | | | | | | |
| | | | | | | | | | | | | | A | | | | | | |
| | | | | | | | | | | | | | [[CG]] | | | | | | |
| | | | | | | | | | | | | | GG | | | | | | |
| | | | | | | | | | | | | | [[CG]] | | | | | | |
| | | | | | | | | | | | | | GCT | | | | | | |
| | | | | | | | | | | | | | [[CG]] | | | | | | |
| | | | | | | | | | | | | | AGTG | | | | | | |
| | | | | | | | | | | | | | [[CG]] | | | | | | |
| | | | | | | | | | | | | | GGGACC | | | | | | |
| | | | | | | | | | | | | | CCAGCC | | | | | | |
| | | | | | | | | | | | | | CCT | | | | | | |
| | | | | | | | | | | | | | [[CG]] | | | | | | |
| | | | | | | | | | | | | | CCCT | | | | | | |
| | | | | | | | | | | | | | [[CG]] | | | | | | |
| | | | | | | | | | | | | | TGAGC | | | | | | |
| NTM_ii | NTM | 0.96 | 0.47 | 0.85 | 0.75 | chr11: | nega- | 11 | 1317812 | 1317813 | chr11: | 103 | C | 1317813 | 1317813 | 1317812 | 1317812 | 1317813 | 1317813 |
| | | | | | | 131780961- | tive | | 52 | 54 | 131781252- | | [[CG]] | 31 | 54 | 52 | 66 | 00 | 27 |
| | | | | | | 131781560 | | | | | 131781354 | | GT | | | | | | |
| | | | | | | | | | | | | | [[CG]] | | | | | | |
| | | | | | | | | | | | | | C | | | | | | |
| | | | | | | | | | | | | | [[CG]] | | | | | | |
| | | | | | | | | | | | | | [[CG]] | | | | | | |
| | | | | | | | | | | | | | GGTTCA | | | | | | |
| | | | | | | | | | | | | | C[CG]C | | | | | | |
| | | | | | | | | | | | | | TCAGTC | | | | | | |
| | | | | | | | | | | | | | CC[CG] | | | | | | |
| | | | | | | | | | | | | | [CG]CT | | | | | | |
| | | | | | | | | | | | | | [CG]CT | | | | | | |
| | | | | | | | | | | | | | C[CG]C | | | | | | |
| | | | | | | | | | | | | | ACCCCA | | | | | | |
| | | | | | | | | | | | | | CCCACT | | | | | | |
| | | | | | | | | | | | | | TCCTGT | | | | | | |
| | | | | | | | | | | | | | GCT | | | | | | |
| | | | | | | | | | | | | | [[CG]] | | | | | | |
| | | | | | | | | | | | | | CC | | | | | | |
| | | | | | | | | | | | | | [[CG]] | | | | | | |
| | | | | | | | | | | | | | GGGGG | | | | | | |
| | | | | | | | | | | | | | [CG]TG | | | | | | |
| | | | | | | | | | | | | | TGC | | | | | | |
| | | | | | | | | | | | | | [[CG]] | | | | | | |
| | | | | | | | | | | | | | TG | | | | | | |
| | | | | | | | | | | | | | [[CG]] | | | | | | |
| | | | | | | | | | | | | | GCTGC | | | | | | |
| | | | | | | | | | | | | | [[CG]] | | | | | | |
| | | | | | | | | | | | | | GAGTT | | | | | | |
| | | | | | | | | | | | | | [[CG]] | | | | | | |
| SERTM1_ii | SERTM1 | 0.82 | 0.65 | 0.75 | 0.55 | chr13: | nega- | 13 | 372482 | 372483 | chr13: | 84 | [[CG]] | 372482 | 372483 | 372482 | 372482 | 372482 | 372482 |
| | | | | | | 37247945- | tive | | 38 | 21 | 37248238- | | GG | 97 | 21 | 38 | 56 | 70 | 95 |
| | | | | | | 37248544 | | | | | 37248321 | | [[CG]] | | | | | | |
| | | | | | | | | | | | | | [[CG]] | | | | | | |
| | | | | | | | | | | | | | TAT | | | | | | |
| | | | | | | | | | | | | | [[CG]] | | | | | | |
| | | | | | | | | | | | | | TCCAGA | | | | | | |
| | | | | | | | | | | | | | C[CG]G | | | | | | |
| | | | | | | | | | | | | | AGCAC | | | | | | |
| | | | | | | | | | | | | | [CG]CC | | | | | | |
| | | | | | | | | | | | | | CCAC | | | | | | |
| | | | | | | | | | | | | | [[CG]] | | | | | | |
| | | | | | | | | | | | | | CTAG | | | | | | |
| | | | | | | | | | | | | | [[CG]] | | | | | | |
| | | | | | | | | | | | | | CAGGAG | | | | | | |
| | | | | | | | | | | | | | ACCTGC | | | | | | |
| | | | | | | | | | | | | | [[CG]] | | | | | | |
| | | | | | | | | | | | | | GGGAAG | | | | | | |
| | | | | | | | | | | | | | T | | | | | | |
| | | | | | | | | | | | | | [[CG]] | | | | | | |
| | | | | | | | | | | | | | [[CG]] | | | | | | |
| | | | | | | | | | | | | | TGTCCT | | | | | | |
| | | | | | | | | | | | | | GACCTG | | | | | | |
| | | | | | | | | | | | | | CAG | | | | | | |
| LINC00403_ | SOX1-OT | 0.9 | 0.11 | 0.75 | 0.86 | chr13: | posi- | 13 | 1127119 | 1127120 | chr13: | 86 | TGAGC | 1127119 | 1127119 | 1127120 | 1127120 | 1127119 | 1127120 |
| i | | | | | | 112711710- | tive | | 67 | 52 | 112711967- | | [[CG]] | 67 | 92 | 27 | 52 | 94 | 25 |
| | | | | | | 112712309 | | | | | 112712052 | | CAAGCC | | | | | | |
| | | | | | | | | | | | | | TTGGAC | | | | | | |
| | | | | | | | | | | | | | T | | | | | | |
| | | | | | | | | | | | | | [[CG]] | | | | | | |
| | | | | | | | | | | | | | CAGAGC | | | | | | |
| | | | | | | | | | | | | | TGC | | | | | | |
| | | | | | | | | | | | | | [[CG]] | | | | | | |
| | | | | | | | | | | | | | GTGCC | | | | | | |
| | | | | | | | | | | | | | [[CG]] | | | | | | |
| | | | | | | | | | | | | | TC | | | | | | |
| | | | | | | | | | | | | | [[CG]] | | | | | | |
| | | | | | | | | | | | | | AGAGCC | | | | | | |
| | | | | | | | | | | | | | CCACCA | | | | | | |
| | | | | | | | | | | | | | G | | | | | | |
| | | | | | | | | | | | | | [[CG]] | | | | | | |
| | | | | | | | | | | | | | [[CG]] | | | | | | |
| | | | | | | | | | | | | | GCTCA | | | | | | |
| | | | | | | | | | | | | | [[CG]] | | | | | | |
| | | | | | | | | | | | | | CCTCAG | | | | | | |
| | | | | | | | | | | | | | TCT | | | | | | |
| | | | | | | | | | | | | | [[CG]] | | | | | | |
| | | | | | | | | | | | | | C | | | | | | |
| | | | | | | | | | | | | | [[CG]] | | | | | | |
| | | | | | | | | | | | | | CCCC | | | | | | |
| PDEIC_ii | PDE1C | 0.92 | 3.26 | 0.75 | 0.9 | chr7: | nega- | 7 | 324676 | 324677 | chr7: | 81 | [[CG]] | 324676 | 324677 | 324676 | 324676 | 324676 | 324676 |
| | | | | | | 32467358- | tive | | 24 | 04 | 32467624- | | [[CG]] | 82 | 04 | 24 | 44 | 48 | 80 |
| | | | | | | 32467957 | | | | | 32467704 | | AATGGG | | | | | | |
| | | | | | | | | | | | | | TCTC | | | | | | |
| | | | | | | | | | | | | | [[CG]] | | | | | | |
| | | | | | | | | | | | | | ACAGCA | | | | | | |
| | | | | | | | | | | | | | A[CG]G | | | | | | |
| | | | | | | | | | | | | | GAGCAG | | | | | | |
| | | | | | | | | | | | | | C | | | | | | |
| | | | | | | | | | | | | | [[CG]] | | | | | | |
| | | | | | | | | | | | | | GTGG | | | | | | |
| | | | | | | | | | | | | | [[CG]] | | | | | | |
| | | | | | | | | | | | | | CCTCAG | | | | | | |
| | | | | | | | | | | | | | GCTG | | | | | | |
| | | | | | | | | | | | | | [[CG]] | | | | | | |
| | | | | | | | | | | | | | GTGGCA | | | | | | |
| | | | | | | | | | | | | | A | | | | | | |
| | | | | | | | | | | | | | [[CG]] | | | | | | |
| | | | | | | | | | | | | | AGCC | | | | | | |
| | | | | | | | | | | | | | [[CG]] | | | | | | |
| | | | | | | | | | | | | | ACTGCA | | | | | | |
| | | | | | | | | | | | | | CTA | | | | | | |
| | | | | | | | | | | | | | [[CG]] | | | | | | |
| | | | | | | | | | | | | | GC | | | | | | |
| REG39_i | N/A | 0.86 | 5.32 | 0.75 | 0.8 | chr19: | posi- | 19 | 224445 | 224146 | chr19: | 71 | [[CG]] | 224445 | 224446 | 224446 | 224446 | 224446 | 224446 |
| | | | | | | 22444294- | tive | | 93 | 63 | 22444593- | | GACT | 93 | 12 | 40 | 63 | 14 | 38 |
| | | | | | | 22444893 | | | | | 22444663 | | [[CG]] | | | | | | |
| | | | | | | | | | | | | | GAGC | | | | | | |
| | | | | | | | | | | | | | [[CG]] | | | | | | |
| | | | | | | | | | | | | | TCCCTG | | | | | | |
| | | | | | | | | | | | | | CCAGTG | | | | | | |
| | | | | | | | | | | | | | GCTTT | | | | | | |
| | | | | | | | | | | | | | [[CG]] | | | | | | |
| | | | | | | | | | | | | | TGGG | | | | | | |
| | | | | | | | | | | | | | [[CG]] | | | | | | |
| | | | | | | | | | | | | | GCCC | | | | | | |
| | | | | | | | | | | | | | [[CG]] | | | | | | |
| | | | | | | | | | | | | | CCTTGG | | | | | | |
| | | | | | | | | | | | | | AGCCCA | | | | | | |
| | | | | | | | | | | | | | GGCCAA | | | | | | |
| | | | | | | | | | | | | | [[CG]] | | | | | | |
| | | | | | | | | | | | | | AGC | | | | | | |
| | | | | | | | | | | | | | [[CG]] | | | | | | |
| | | | | | | | | | | | | | C | | | | | | |
| RBFOX_i | RBFOX1 | 0.9 | 6.94 | 0.75 | 0.85 | chr16: | posi- | 16 | 60693 | 60694 | chr16: | 76 | [[CG]] | 60693 | 60693 | 60693 | 60694 | 60693 | 60693 |
| | | | | | | 6069102- | tive | | 28 | 03 | 6069328- | | CTGC | 28 | 53 | 81 | 03 | 55 | 79 |
| | | | | | | 6069701 | | | | | 6069403 | | [[CG]] | | | | | | |
| | | | | | | | | | | | | | C | | | | | | |
| | | | | | | | | | | | | | [[CG]] | | | | | | |
| | | | | | | | | | | | | | CCTCCT | | | | | | |
| | | | | | | | | | | | | | CCAGCC | | | | | | |
| | | | | | | | | | | | | | AGAGT | | | | | | |
| | | | | | | | | | | | | | [[CG]] | | | | | | |
| | | | | | | | | | | | | | GTGGGA | | | | | | |
| | | | | | | | | | | | | | CTGGCT | | | | | | |
| | | | | | | | | | | | | | G | | | | | | |
| | | | | | | | | | | | | | [[CG]] | | | | | | |
| | | | | | | | | | | | | | CTGCCC | | | | | | |
| | | | | | | | | | | | | | TGAAGT | | | | | | |
| | | | | | | | | | | | | | GGTTCT | | | | | | |
| | | | | | | | | | | | | | CCAAGC | | | | | | |
| | | | | | | | | | | | | | AG | | | | | | |
| | | | | | | | | | | | | | [[CG]] | | | | | | |
| | | | | | | | | | | | | | [[CG]] | | | | | | |
| | | | | | | | | | | | | | G | | | | | | |
| GALR1_i | GALR1 | 0.9 | 1.95 | 0.75 | 0.8 | chr18: | posi- | 18 | 749625 | 749626 | chr18: | 90 | GTGGAG | 749625 | 749626 | 749626 | 749626 | 749626 | 749626 |
| | | | | | | 74962373- | tive | | 95 | 84 | 74962595- | | AACTT | 95 | 17 | 66 | 84 | 20 | 44 |
| | | | | | | 74962972 | | | | | 74962684 | | [[CG]] | | | | | | |
| | | | | | | | | | | | | | TCA | | | | | | |
| | | | | | | | | | | | | | [[CG]] | | | | | | |
| | | | | | | | | | | | | | CTGGTG | | | | | | |
| | | | | | | | | | | | | | GTGTT | | | | | | |
| | | | | | | | | | | | | | [[CG]] | | | | | | |
| | | | | | | | | | | | | | GCCTGA | | | | | | |
| | | | | | | | | | | | | | TCTT | | | | | | |
| | | | | | | | | | | | | | [[CG]] | | | | | | |
| | | | | | | | | | | | | | [[CG]] | | | | | | |
| | | | | | | | | | | | | | CTGGGT | | | | | | |
| | | | | | | | | | | | | | GTGCTG | | | | | | |
| | | | | | | | | | | | | | GGCAAC | | | | | | |
| | | | | | | | | | | | | | AGCCTA | | | | | | |
| | | | | | | | | | | | | | GTGATC | | | | | | |
| | | | | | | | | | | | | | AC | | | | | | |
| | | | | | | | | | | | | | [[CG]] | | | | | | |
| | | | | | | | | | | | | | TGCTGG | | | | | | |
| | | | | | | | | | | | | | [[CG]] | | | | | | |
| | | | | | | | | | | | | | [[CG]] | | | | | | |
| | | | | | | | | | | | | | C | | | | | | |
| MDGA_I | MDGA2 | 0.92 | 4.73 | 0.75 | 0.85 | chr14: | posi- | 14 | 481440 | 481441 | chr14: | 115 | GGGTGC | 481440 | 481441 | 481441 | 481441 | 481441 | 481441 |
| | | | | | | 48143898- | tive | | 84 | 98 | 48144084- | | CTGGGA | 84 | 05 | 79 | 98 | 47 | 73 |
| | | | | | | 48144497 | | | | | 48144198 | | AAAT | | | | | | |
| | | | | | | | | | | | | | [[CG]] | | | | | | |
| | | | | | | | | | | | | | CAGA | | | | | | |
| | | | | | | | | | | | | | [CG]C | | | | | | |
| | | | | | | | | | | | | | [CG]GG | | | | | | |
| | | | | | | | | | | | | | GAGGAG | | | | | | |
| | | | | | | | | | | | | | CAGGGG | | | | | | |
| | | | | | | | | | | | | | G[CG]G | | | | | | |
| | | | | | | | | | | | | | TGATGG | | | | | | |
| | | | | | | | | | | | | | GAAGGG | | | | | | |
| | | | | | | | | | | | | | GAGCTG | | | | | | |
| | | | | | | | | | | | | | [[CG]] | | | | | | |
| | | | | | | | | | | | | | AGG | | | | | | |
| | | | | | | | | | | | | | [[CG]] | | | | | | |
| | | | | | | | | | | | | | AAGTGT | | | | | | |
| | | | | | | | | | | | | | TCTTCA | | | | | | |
| | | | | | | | | | | | | | GGGAAG | | | | | | |
| | | | | | | | | | | | | | [[CG]] | | | | | | |
| | | | | | | | | | | | | | GGCT | | | | | | |
| | | | | | | | | | | | | | [CG]AG | | | | | | |
| | | | | | | | | | | | | | TCTC | | | | | | |
| | | | | | | | | | | | | | [[CG]] | | | | | | |
| | | | | | | | | | | | | | CAGCTG | | | | | | |
| | | | | | | | | | | | | | [[CG]] | | | | | | |
| | | | | | | | | | | | | | G | | | | | | |
| | | | | | | | | | | | | | [[CG]] | | | | | | |
| FUT9_ii | FUT9 | 0.94 | 2.82 | 0.75 | 0.9 | chr6: | nega- | 6 | 964639 | 964640 | chr6: | 103 | [[CG]] | 964639 | 964640 | 964639 | 964639 | 964639 | 964639 |
| | | | | | | 96463603- | tive | | 02 | 04 | 96463902- | | CAGCAG | 84 | 04 | 02 | 25 | 48 | 70 |
| | | | | | | 96464202 | | | | | 96464004 | | CTCCAG | | | | | | |
| | | | | | | | | | | | | | ATTCAC | | | | | | |
| | | | | | | | | | | | | | TGCTCT | | | | | | |
| | | | | | | | | | | | | | CCCCTG | | | | | | |
| | | | | | | | | | | | | | CAGCTC | | | | | | |
| | | | | | | | | | | | | | CC[CG] | | | | | | |
| | | | | | | | | | | | | | [CG]CC | | | | | | |
| | | | | | | | | | | | | | CC | | | | | | |
| | | | | | | | | | | | | | [[CG]] | | | | | | |
| | | | | | | | | | | | | | C | | | | | | |
| | | | | | | | | | | | | | [[CG]] | | | | | | |
| | | | | | | | | | | | | | CTGT | | | | | | |
| | | | | | | | | | | | | | [[CG]] | | | | | | |
| | | | | | | | | | | | | | CTGCCT | | | | | | |
| | | | | | | | | | | | | | [[CG]] | | | | | | |
| | | | | | | | | | | | | | GTGTCC | | | | | | |
| | | | | | | | | | | | | | CCCAGC | | | | | | |
| | | | | | | | | | | | | | CCCAGT | | | | | | |
| | | | | | | | | | | | | | [[CG]] | | | | | | |
| | | | | | | | | | | | | | [[CG]] | | | | | | |
| | | | | | | | | | | | | | CTCTTA | | | | | | |
| | | | | | | | | | | | | | GGACAG | | | | | | |
| | | | | | | | | | | | | | [[CG]] | | | | | | |
| LHX8_i | LHX8 | 0.94 | 0 | 0.75 | 0.84 | chr1: | posi- | 1 | 756021 | 756021 | chr1: | 79 | GAAGGA | 756021 | 756021 | 756021 | 756021 | 756021 | 756021 |
| | | | | | | 75601868- | tive | | 07 | 85 | 75602107- | | GGCTG | 07 | 26 | 63 | 85 | 39 | 61 |
| | | | | | | 75602467 | | | | | 75602185 | | [[CG]] | | | | | | |
| | | | | | | | | | | | | | [[CG]] | | | | | | |
| | | | | | | | | | | | | | CCAGCC | | | | | | |
| | | | | | | | | | | | | | [CG]CC | | | | | | |
| | | | | | | | | | | | | | [CG] | | | | | | |
| | | | | | | | | | | | | | [CG]G | | | | | | |
| | | | | | | | | | | | | | [CG]CC | | | | | | |
| | | | | | | | | | | | | | [[CG]] | | | | | | |
| | | | | | | | | | | | | | GGCTCA | | | | | | |
| | | | | | | | | | | | | | GG | | | | | | |
| | | | | | | | | | | | | | [[CG]] | | | | | | |
| | | | | | | | | | | | | | C | | | | | | |
| | | | | | | | | | | | | | [[CG]] | | | | | | |
| | | | | | | | | | | | | | TGA | | | | | | |
| | | | | | | | | | | | | | [[CG]] | | | | | | |
| | | | | | | | | | | | | | GCTGCA | | | | | | |
| | | | | | | | | | | | | | [[CG]] | | | | | | |
| | | | | | | | | | | | | | [[CG]] | | | | | | |
| | | | | | | | | | | | | | CTGCCC | | | | | | |
| | | | | | | | | | | | | | [[CG]] | | | | | | |
| | | | | | | | | | | | | | CACTCT | | | | | | |
| | | | | | | | | | | | | | G | | | | | | |
| ELAVL4_i | ELAVL4 | 0.84 | 3.67 | 0.75 | 0.85 | chr1: | posi- | 1 | 505137 | 505137 | chr1: | 71 | [[CG]] | 505137 | 505137 | 505137 | 505137 | 505137 | 505137 |
| | | | | | | 50513450- | tive | | 18 | 88 | 50513718- | | GAGC | 18 | 40 | 70 | 88 | 43 | 65 |
| | | | | | | 50514049 | | | | | 50513788 | | [[CG]] | | | | | | |
| | | | | | | | | | | | | | CAGAG | | | | | | |
| | | | | | | | | | | | | | [[CG]] | | | | | | |
| | | | | | | | | | | | | | AGCTAG | | | | | | |
| | | | | | | | | | | | | | AGAG | | | | | | |
| | | | | | | | | | | | | | [[CG]] | | | | | | |
| | | | | | | | | | | | | | AGAG | | | | | | |
| | | | | | | | | | | | | | [[CG]] | | | | | | |
| | | | | | | | | | | | | | GTGAGA | | | | | | |
| | | | | | | | | | | | | | CTCTG | | | | | | |
| | | | | | | | | | | | | | [[CG]] | | | | | | |
| | | | | | | | | | | | | | GA[CG] | | | | | | |
| | | | | | | | | | | | | | TCTTCC | | | | | | |
| | | | | | | | | | | | | | [[CG]] | | | | | | |
| | | | | | | | | | | | | | CC | | | | | | |
| | | | | | | | | | | | | | [[CG]] | | | | | | |
| | | | | | | | | | | | | | C | | | | | | |
| | | | | | | | | | | | | | [[CG]] | | | | | | |
| | | | | | | | | | | | | | [[CG]] | | | | | | |
| | | | | | | | | | | | | | CTCC | | | | | | |
| NET01_i | NETO1 | 0.93 | 3.48 | 0.75 | 0.85 | chr18: | posi- | 18 | 705342 | 705343 | chr18: | 75 | AC | 705342 | 705342 | 705343 | 705343 | 705342 | 705343 |
| | | | | | | 70533999- | tive | | 72 | 46 | 70534272- | | [[CG]] | 72 | 93 | 23 | 46 | 95 | 15 |
| | | | | | | 70534598 | | | | | 70534346 | | TTCTC | | | | | | |
| | | | | | | | | | | | | | [[CG]] | | | | | | |
| | | | | | | | | | | | | | GCAGGT | | | | | | |
| | | | | | | | | | | | | | TTTGGG | | | | | | |
| | | | | | | | | | | | | | ATC | | | | | | |
| | | | | | | | | | | | | | [[CG]] | | | | | | |
| | | | | | | | | | | | | | G | | | | | | |
| | | | | | | | | | | | | | [[CG]] | | | | | | |
| | | | | | | | | | | | | | A | | | | | | |
| | | | | | | | | | | | | | [[CG]] | | | | | | |
| | | | | | | | | | | | | | GCTGAC | | | | | | |
| | | | | | | | | | | | | | [[CG]] | | | | | | |
| | | | | | | | | | | | | | [[CG]] | | | | | | |
| | | | | | | | | | | | | | [CG]C | | | | | | |
| | | | | | | | | | | | | | [CG]CC | | | | | | |
| | | | | | | | | | | | | | CCCA | | | | | | |
| | | | | | | | | | | | | | [[CG]] | | | | | | |
| | | | | | | | | | | | | | CC | | | | | | |
| | | | | | | | | | | | | | [[CG]] | | | | | | |
| | | | | | | | | | | | | | GTTCCA | | | | | | |
| | | | | | | | | | | | | | [[CG]] | | | | | | |
| | | | | | | | | | | | | | ATGCTG | | | | | | |
| RNF291_ii | RNF219- | 0.88 | 5.01 | 0.75 | 0.75 | chr13: | nega- | 13 | 791702 | 791703 | chr13: | 84 | GGCCTA | 791703 | 791703 | 791702 | 791703 | 791703 | 791703 |
| | AS1 | | | | | 79170004- | tive | | 84 | 67 | 79170284- | | AGGC | 41 | 67 | 84 | 08 | 14 | 38 |
| | | | | | | 79170603 | | | | | 79170367 | | [[CG]] | | | | | | |
| | | | | | | | | | | | | | TTGACC | | | | | | |
| | | | | | | | | | | | | | T | | | | | | |
| | | | | | | | | | | | | | [[CG]] | | | | | | |
| | | | | | | | | | | | | | GGTTCT | | | | | | |
| | | | | | | | | | | | | | CCC | | | | | | |
| | | | | | | | | | | | | | [[CG]] | | | | | | |
| | | | | | | | | | | | | | GCACAG | | | | | | |
| | | | | | | | | | | | | | T | | | | | | |
| | | | | | | | | | | | | | [[CG]] | | | | | | |
| | | | | | | | | | | | | | AATCCA | | | | | | |
| | | | | | | | | | | | | | [[CG]] | | | | | | |
| | | | | | | | | | | | | | CCAGGG | | | | | | |
| | | | | | | | | | | | | | CCCTCA | | | | | | |
| | | | | | | | | | | | | | GGC | | | | | | |
| | | | | | | | | | | | | | [[CG]] | | | | | | |
| | | | | | | | | | | | | | GTAGCT | | | | | | |
| | | | | | | | | | | | | | GTCCTG | | | | | | |
| | | | | | | | | | | | | | CAGTCC | | | | | | |
| LINC00403_ | SOX1- | 0.94 | 2.97 | 0.75 | 0.85 | chr13: | nega- | 13 | 1127172 | 1127173 | chr13: | 85 | CC | 1127173 | 1127173 | 1127172 | 1127172 | 1127172 | 1127173 |
| iv | OT | | | | | 112716945- | tive | | 33 | 17 | 112717233- | | [[CG]] | 03 | 17 | 33 | 51 | 83 | 01 |
| | | | | | | 112717544 | | | | | 112717317 | | GTGTCT | | | | | | |
| | | | | | | | | | | | | | C | | | | | | |
| | | | | | | | | | | | | | [[CG]] | | | | | | |
| | | | | | | | | | | | | | [[CG]] | | | | | | |
| | | | | | | | | | | | | | AGGG | | | | | | |
| | | | | | | | | | | | | | [CG]G | | | | | | |
| | | | | | | | | | | | | | [CG]G | | | | | | |
| | | | | | | | | | | | | | [CG]GC | | | | | | |
| | | | | | | | | | | | | | CAGCAG | | | | | | |
| | | | | | | | | | | | | | A[CG]G | | | | | | |
| | | | | | | | | | | | | | [CG]AT | | | | | | |
| | | | | | | | | | | | | | [CG]AG | | | | | | |
| | | | | | | | | | | | | | G[CG] | | | | | | |
| | | | | | | | | | | | | | [[CG]] | | | | | | |
| | | | | | | | | | | | | | [[CG]] | | | | | | |
| | | | | | | | | | | | | | CCA | | | | | | |
| | | | | | | | | | | | | | [[CG]] | | | | | | |
| | | | | | | | | | | | | | GCA | | | | | | |
| | | | | | | | | | | | | | [[CG]] | | | | | | |
| | | | | | | | | | | | | | GCCAG | | | | | | |
| | | | | | | | | | | | | | [CG]CA | | | | | | |
| | | | | | | | | | | | | | GACA | | | | | | |
| | | | | | | | | | | | | | [[CG]] | | | | | | |
| | | | | | | | | | | | | | C | | | | | | |
| | | | | | | | | | | | | | [[CG]] | | | | | | |
| | | | | | | | | | | | | | [[CG]] | | | | | | |
| | | | | | | | | | | | | | G | | | | | | |
| MHC_ii | N/A | 0.92 | 1.43 | 0.75 | 0.8 | chr6: | nega- | 6 | 295213 | 295214 | chr6: | 85 | GCC | 295214 | 295214 | 295213 | 295213 | 295214 | 295214 |
| | | | | | | 29521121- | tive | | 75 | 59 | 29521375- | | [[CG]] | 35 | 59 | 75 | 94 | 05 | 29 |
| | | | | | | 29521720 | | | | | 29521459 | | CTG | | | | | | |
| | | | | | | | | | | | | | [[CG]] | | | | | | |
| | | | | | | | | | | | | | CTATG | | | | | | |
| | | | | | | | | | | | | | [[CG]] | | | | | | |
| | | | | | | | | | | | | | GGGCT | | | | | | |
| | | | | | | | | | | | | | [CG]TC | | | | | | |
| | | | | | | | | | | | | | TCCC | | | | | | |
| | | | | | | | | | | | | | [[CG]] | | | | | | |
| | | | | | | | | | | | | | [[CG]] | | | | | | |
| | | | | | | | | | | | | | CCTATG | | | | | | |
| | | | | | | | | | | | | | T | | | | | | |
| | | | | | | | | | | | | | [[CG]] | | | | | | |
| | | | | | | | | | | | | | CA | | | | | | |
| | | | | | | | | | | | | | [[CG]] | | | | | | |
| | | | | | | | | | | | | | CTGGCC | | | | | | |
| | | | | | | | | | | | | | AG[CG] | | | | | | |
| | | | | | | | | | | | | | CCTCCT | | | | | | |
| | | | | | | | | | | | | | GGCTAA | | | | | | |
| | | | | | | | | | | | | | G | | | | | | |
| | | | | | | | | | | | | | [[CG]] | | | | | | |
| | | | | | | | | | | | | | GCCTCA | | | | | | |
| | | | | | | | | | | | | | CCAACT | | | | | | |
| | | | | | | | | | | | | | C | | | | | | |
| NID2_i | NID2 | 0.92 | 4.51 | 0.75 | 0.85 | chr14: | posi- | 14 | 525361 | 525361 | chr14: | 70 | TGCAGG | 525361 | 525361 | 525361 | 525361 | 525361 | 525361 |
| | | | | | | 52535876- | tive | | 29 | 98 | 52536129- | | AGATGA | 29 | 54 | 82 | 98 | 56 | 78 |
| | | | | | | 52536475 | | | | | 52536198 | | GCTCAG | | | | | | |
| | | | | | | | | | | | | | [[CG]] | | | | | | |
| | | | | | | | | | | | | | CAAAGG | | | | | | |
| | | | | | | | | | | | | | GAACCC | | | | | | |
| | | | | | | | | | | | | | [[CG]] | | | | | | |
| | | | | | | | | | | | | | CAG | | | | | | |
| | | | | | | | | | | | | | [[CG]] | | | | | | |
| | | | | | | | | | | | | | G | | | | | | |
| | | | | | | | | | | | | | [[CG]] | | | | | | |
| | | | | | | | | | | | | | AGTG | | | | | | |
| | | | | | | | | | | | | | [[CG]] | | | | | | |
| | | | | | | | | | | | | | GCTGCT | | | | | | |
| | | | | | | | | | | | | | GGCCTG | | | | | | |
| | | | | | | | | | | | | | [[CG]] | | | | | | |
| | | | | | | | | | | | | | [[CG]] | | | | | | |
| | | | | | | | | | | | | | CTGTGG | | | | | | |
| ZIC4 | ZIC4 | 0.92 | 6.89 | 0.75 | 0.9 | chr3: | nega- | 3 | 1471087 | 1471088 | chr3: | 89 | GG | 1471088 | 1471088 | 1471087 | 1471088 | 1471088 | 1471088 |
| | | | | | | 147108544- | tive | | 96 | 84 | 147108796- | | [[CG]] | 59 | 84 | 96 | 21 | 24 | 54 |
| | | | | | | 147109143 | | | | | 147108884 | | ACA | | | | | | |
| | | | | | | | | | | | | | [[CG]] | | | | | | |
| | | | | | | | | | | | | | AGGGCA | | | | | | |
| | | | | | | | | | | | | | GA | | | | | | |
| | | | | | | | | | | | | | [[CG]] | | | | | | |
| | | | | | | | | | | | | | GTGTAG | | | | | | |
| | | | | | | | | | | | | | C[CG]A | | | | | | |
| | | | | | | | | | | | | | AT | | | | | | |
| | | | | | | | | | | | | | [[CG]] | | | | | | |
| | | | | | | | | | | | | | TAGCCA | | | | | | |
| | | | | | | | | | | | | | GAGCTG | | | | | | |
| | | | | | | | | | | | | | GG | | | | | | |
| | | | | | | | | | | | | | [[CG]] | | | | | | |
| | | | | | | | | | | | | | G | | | | | | |
| | | | | | | | | | | | | | [[CG]] | | | | | | |
| | | | | | | | | | | | | | G | | | | | | |
| | | | | | | | | | | | | | [[CG]] | | | | | | |
| | | | | | | | | | | | | | AG | | | | | | |
| | | | | | | | | | | | | | [[CG]] | | | | | | |
| | | | | | | | | | | | | | CC[CG] | | | | | | |
| | | | | | | | | | | | | | TGCACC | | | | | | |
| | | | | | | | | | | | | | TTCATG | | | | | | |
| | | | | | | | | | | | | | TGCTTA | | | | | | |
| | | | | | | | | | | | | | [[CG]] | | | | | | |
| | | | | | | | | | | | | | CAG | | | | | | |
| | | | | | | | | | | | | | [[CG]] | | | | | | |
| | | | | | | | | | | | | | A | | | | | | |
| RCN1_i | RCN1 | 0.92 | 3.93 | 0.75 | 0.85 | chr11: | posi- | 11 | 320089 | 320090 | chr11: | 84 | [[CG]] | 320089 | 320089 | 320090 | 320090 | 320089 | 320090 |
| | | | | | | 32008662- | tive | | 59 | 42 | 32008959- | | [[CG]] | 59 | 79 | 23 | 42 | 91 | 19 |
| | | | | | | 32009261 | | | | | 32009042 | | AAGGAA | | | | | | |
| | | | | | | | | | | | | | AGTGCT | | | | | | |
| | | | | | | | | | | | | | A | | | | | | |
| | | | | | | | | | | | | | [[CG]] | | | | | | |
| | | | | | | | | | | | | | AA[CG] | | | | | | |
| | | | | | | | | | | | | | TCAAAT | | | | | | |
| | | | | | | | | | | | | | GGC | | | | | | |
| | | | | | | | | | | | | | [[CG]] | | | | | | |
| | | | | | | | | | | | | | CCCCC | | | | | | |
| | | | | | | | | | | | | | [[CG]] | | | | | | |
| | | | | | | | | | | | | | C | | | | | | |
| | | | | | | | | | | | | | [[CG]] | | | | | | |
| | | | | | | | | | | | | | A | | | | | | |
| | | | | | | | | | | | | | [[CG]] | | | | | | |
| | | | | | | | | | | | | | CCATCT | | | | | | |
| | | | | | | | | | | | | | GCTCTG | | | | | | |
| | | | | | | | | | | | | | [[CG]] | | | | | | |
| | | | | | | | | | | | | | AAGCAG | | | | | | |
| | | | | | | | | | | | | | AAA | | | | | | |
| | | | | | | | | | | | | | [[CG]] | | | | | | |
| | | | | | | | | | | | | | G | | | | | | |
| | | | | | | | | | | | | | [[CG]] | | | | | | |
| | | | | | | | | | | | | | GCAGCT | | | | | | |
| | | | | | | | | | | | | | G | | | | | | |
| | | | | | | | | | | | | | [[CG]] | | | | | | |
| RP4_ii | N/A | 0.85 | 5.38 | 0.75 | 0.7 | chr12: | nega- | 12 | 1266760 | 1266761 | chr12: | 102 | GGGCAA | 1266761 | 1266761 | 1266760 | 1266760 | 1266760 | 1266760 |
| | | | | | | 126675749- | tive | | 38 | 39 | 126676038- | | GGGC | 11 | 39 | 38 | 59 | 63 | 94 |
| | | | | | | 126676348 | | | | | 126676139 | | [[CG]] | | | | | | |
| | | | | | | | | | | | | | GGGC | | | | | | |
| | | | | | | | | | | | | | [[CG]] | | | | | | |
| | | | | | | | | | | | | | GACACA | | | | | | |
| | | | | | | | | | | | | | GGAGCA | | | | | | |
| | | | | | | | | | | | | | G | | | | | | |
| | | | | | | | | | | | | | [[CG]] | | | | | | |
| | | | | | | | | | | | | | GGGATG | | | | | | |
| | | | | | | | | | | | | | C | | | | | | |
| | | | | | | | | | | | | | [[CG]] | | | | | | |
| | | | | | | | | | | | | | GGTG | | | | | | |
| | | | | | | | | | | | | | [[CG]] | | | | | | |
| | | | | | | | | | | | | | CTC | | | | | | |
| | | | | | | | | | | | | | [[CG]] | | | | | | |
| | | | | | | | | | | | | | AGGGTG | | | | | | |
| | | | | | | | | | | | | | TGGCCC | | | | | | |
| | | | | | | | | | | | | | C[CG]G | | | | | | |
| | | | | | | | | | | | | | GCTGTG | | | | | | |
| | | | | | | | | | | | | | [[CG]] | | | | | | |
| | | | | | | | | | | | | | GGGCTC | | | | | | |
| | | | | | | | | | | | | | AGAGCT | | | | | | |
| | | | | | | | | | | | | | GCTTGC | | | | | | |
| | | | | | | | | | | | | | TGGG | | | | | | |
| | | | | | | | | | | | | | [[CG]] | | | | | | |
| | | | | | | | | | | | | | C | | | | | | |
| RYR2_i | RYR2 | 0.92 | 4.15 | 0.75 | 0.85 | chr1: | posi- | 1 | 2372053 | 2372054 | chr1: | 67 | G | 2372053 | 2372053 | 2372053 | 2372054 | 2372053 | 2372053 |
| | | | | | | 237205085- | tive | | 44 | 10 | 237205344- | | [[CG]] | 44 | 61 | 88 | 10 | 68 | 86 |
| | | | | | | 237205684 | | | | | 237205410 | | CTGGGC | | | | | | |
| | | | | | | | | | | | | | CT | | | | | | |
| | | | | | | | | | | | | | [[CG]] | | | | | | |
| | | | | | | | | | | | | | GGTTTG | | | | | | |
| | | | | | | | | | | | | | G[CG]G | | | | | | |
| | | | | | | | | | | | | | CC | | | | | | |
| | | | | | | | | | | | | | [[CG]] | | | | | | |
| | | | | | | | | | | | | | GAGGAG | | | | | | |
| | | | | | | | | | | | | | [[CG]] | | | | | | |
| | | | | | | | | | | | | | GGCTG | | | | | | |
| | | | | | | | | | | | | | [[CG]] | | | | | | |
| | | | | | | | | | | | | | GATTAC | | | | | | |
| | | | | | | | | | | | | | CTGCAG | | | | | | |
| | | | | | | | | | | | | | CAG | | | | | | |
| | | | | | | | | | | | | | [[CG]] | | | | | | |
| | | | | | | | | | | | | | GGGAGC | | | | | | |
| | | | | | | | | | | | | | [[CG]] | | | | | | |

1. A method comprising assaying from a sample from an individual
the methylation status of a panel of:
i. one or more CpGs selected from a panel of CpGs identified in SEQ ID NOs 1 to 5000 wherein the CpGs are identified at nucleotide positions 61 to 62; and/or
ii. one or more CpGs selected from within a panel of one or more Differentially Methylated Regions (DMRs) defined by SEQ ID NOs 5001 to 5418, wherein the CpGs are denoted by CG.

2. A method according to claim 1, wherein the panel of one or more CpGs comprises:
i) at least 500 CpGs selected from the CpGs identified at nucleotide positions 61 to 62 in SEQ ID NOs 1 to 5000, and optionally wherein the panel of one or more CpGs comprises at least the CpGs identified in SEQ ID NOs 1 to 500 and identified at nucleotide positions 61 to 62; or
ii) at least 1000 CpGs selected from the CpGs identified at nucleotide positions 61 to 62 in SEQ ID NOs 1 to 5000, and optionally wherein the panel of one or more CpGs comprises at least the CpGs identified in SEQ ID NOs 1 to 1000 and identified at nucleotide positions 61 to 62; or
iii) at least 1500 CpGs selected from the CpGs identified at nucleotide positions 61 to 62 in SEQ ID NOs 1 to 5000, and optionally wherein the panel of one or more CpGs comprises at least the CpGs identified in SEQ ID NOs 1 to 1500 and identified at nucleotide positions 61 to 62; or
iv) at least 2000 CpGs selected from the CpGs identified at nucleotide positions 61 to 62 in SEQ ID NOs 1 to 5000, and optionally wherein the panel of one or more CpGs comprises at least the CpGs identified in SEQ ID NOs 1 to 2000 and identified at nucleotide positions 61 to 62; or
v) at least the 5000 CpGs identified at nucleotide positions 61 to 62 in SEQ ID NOs 1 to 5000.

3. (canceled)

4. (canceled)

5. (canceled)

6. (canceled)

7. (canceled)

8. (canceled)

9. (canceled)

10. (canceled)

11. (canceled)

12. (canceled)

13. (canceled)

14. (canceled)

15. (canceled)

16. A method according to claim 1, wherein the step of assaying the methylation status of a panel of one or more CpGs comprises assaying the methylation status of one or more CpGs denoted by CG identified in a panel of one or more DMRs defined by SEQ ID NOs 5001 to 5418, optionally wherein the panel of one or more CpGs comprises two or more CpGs denoted by CG identified in the panel of DMR(s), three or more CpGs denoted by CG identified in the panel of DMR(s), four or more CpGs denoted by CG identified in the panel of DMR(s), or all CpGs denoted by CG identified in the DMR(s) defined by SEQ ID NOs 5001 to 5418.

17. A method according to claim 1, wherein the step of assaying the methylation status of a panel of the one or more CpGs comprises assaying the methylation status of five or more, six or more, seven or more, eight or more, or nine or more, or all of the CpGs denoted by CG within any one or more of the DMRs defined by SEQ ID NOs 5001 to 5418.

18. A method according to claim 1, wherein the step of assaying the methylation status of a panel of one or more CpGs comprises assaying the methylation status of two or more, three or more, four or more, five or more, six or more, seven or more, eight or more, or nine or more, or all of the CpGs denoted by CG within:
a. any combination of two, three, four, five, six, seven, eight, or nine or more of DMRs 1 to 418;
b. any combination of ten, twenty, thirty, forty, fifty, sixty, seventy, eighty, or ninety or more of DMRs 1 to 418;
c. all 418 of DMRs 1 to 418;
d. one DMR defined by SEQ ID NO: 5001, two DMRs defined by SEQ ID NOs: 5001 to 5002, three DMRs defined by SEQ ID NOs: 5001 to 5003, four DMRs defined by SEQ ID NOs: 5001 to 5004, five DMRs defined by SEQ ID NOs: 5001 to 5005, six DMRs defined by SEQ ID NOs: 5001 to 5006, seven DMRs defined by SEQ ID NOs: 5001 to 5007, eight DMRs defined by SEQ ID NOs: 5001 to 5008, or nine DMRs defined by SEQ ID NOs: 5001 to 5009;
e. any combination of one or more DMRs defined by SEQ ID NO: 5391, SEQ ID NO: 5392, SEQ ID NO: 5393, SEQ ID NO: 5407 and SEQ ID NO: 5414, preferably within all of SEQ ID NO: 5391, SEQ ID NO: 5392, SEQ ID NO: 5393, SEQ ID NO: 5407 and SEQ ID NO: 5414; f. any combination of one or more DMRs defined by SEQ ID NO: 5392, SEQ ID NO: 5393 and SEQ ID NO: 5407, preferably within all of SEQ ID NO: 5392, SEQ ID NO: 5393 and SEQ ID NO: 5407; or g. ten DMRs defined by SEQ ID NOs: 5001 to 5010, twenty DMRs defined by SEQ ID NOs: 5001 to 5020, thirty DMRs defined by SEQ ID NOs: 5001 to 5030, forty DMRs defined by SEQ ID NOs: 5001 to 5040, fifty DMRs defined by SEQ ID NOs: 5001 to 5050, sixty DMRs defined by
SEQ ID NOs: 5001 to 5060, seventy DMRs defined by SEQ ID NOs: 5001 to 5070, eighty DMRs defined by SEQ ID NOs: 5001 to 5080, or ninety DMRs defined by SEQ ID NOs: 5001 to 5090;
h. fifty DMRs defined by SEQ ID NOs: 5001 to 5050, SEQ ID NOs: 5051 to 5100, SEQ ID NOs: 5101 to 5150, SEQ ID NOs: 5151 to 5200, SEQ ID NOs: 5201 to 5250, SEQ ID NOs: 5301 to 5350, or SEQ ID NOs: 5341 to 5418; or
i. eighty one DMRs defined by SEQ ID NOs: 5015, 5016, 5017, 5025, 5026, 5027, 5028, 5029, 5032, 5033, 5048, 5049, 5050, 5053, 5054, 5057, 5068, 5069, 5071, 5072, 5073, 5074, 5075, 5076, 5077, 5083, 5090, 5091, 5092, 5093, 5094, 5095, 5096, 5099, 5102, 5137, 5138, 5140, 5143, 5146, 5147, 5148, 5149, 5150, 5151, 5164, 5165, 5167, 5175, 5176, 5177, 5179, 5180, 5185, 5204, 5224, 5226, 5228, 5232, 5246, 5248, 5285, 5287, 5293, 5307, 5309, 5315, 5317, 5324, 5328, 5337, 5339, 5340, 5348, 5349, 5354, 5361, 5362, 5366, 5368 and 5377.

19. A method according to claim 1, wherein the step of assaying the methylation status of a panel of one or more CpGs comprises assaying the methylation status of one or more CpGs within any one or more DMRs selected from the group of DMRs consisting of DMRs 1 to 418 as defined by SEQ ID NOs 5001 to 5418, including:
1. one or more CpGs within DMR 1 as defined by SEQ ID NO: 5001 and denoted by CG, preferably wherein the panel of one or more CpGs comprises at least the CpGs denoted by [[CG]];
2. one or more CpGs within DMR 2 as defined by SEQ ID NO: 5002 and denoted by CG, preferably wherein the panel of one or more CpGs comprises at least the CpGs denoted by [[CG]];
3. one or more CpGs within DMR 3 as defined by SEQ ID NO: 5003 and denoted by CG, preferably wherein the panel of one or more CpGs comprises at least the CpGs denoted by [[CG]];
4. one or more CpGs within DMR 4 as defined by SEQ ID NO: 5004 and denoted by CG, preferably wherein the panel of one or more CpGs comprises at least the CpGs denoted by [[CG]];
5. one or more CpGs within DMR 5 as defined by SEQ ID NO: 5005 and denoted by CG, preferably wherein the panel of one or more CpGs comprises at least the CpGs denoted by [[CG]];
6. one or more CpGs within DMR 6 as defined by SEQ ID NO: 5006 and denoted by CG, preferably wherein the panel of one or more CpGs comprises at least the CpGs denoted by [[CG]];
7. one or more CpGs within DMR 7 as defined by SEQ ID NO: 5007 and denoted by CG, preferably wherein the panel of one or more CpGs comprises at least the CpGs denoted by [[CG]];
8. one or more CpGs within DMR 8 as defined by SEQ ID NO: 5008 and denoted by CG, preferably wherein the panel of one or more CpGs comprises at least the CpGs denoted by [[CG]];
9. one or more CpGs within DMR 9 as defined by SEQ ID NO: 5009 and denoted by CG, preferably wherein the panel of one or more CpGs comprises at least the CpGs denoted by [[CG]]; and/or
10. one or more CpGs within DMR 10 as defined by SEQ ID NO: 5010 and denoted by CG, preferably wherein the panel of one or more CpGs comprises at least the CpGs denoted by [[CG]].

20. (canceled)

21. (canceled)

22. A method according to claim 1, wherein the step of assaying the methylation status of the one or more CpGs in the panel further comprises or additionally comprises assaying the methylation status of each CpG within one or more of the sequences identified by SEQ ID NOs 5703 to 5786, and optionally wherein the step of assaying the methylation status of the one or more CpGs in the panel comprises assaying each CpG within:
a. SEQ ID NO 5759 and/or SEQ ID NO 5703 and/or SEQ ID NO 5731;
b. SEQ ID NO 5760 and/or SEQ ID NO 5704 and/or SEQ ID NO 5732;
c. SEQ ID NO 5761 and/or SEQ ID NO 5705 and/or SEQ ID NO 5733;
d. SEQ ID NO 5762 and/or SEQ ID NO 5706 and/or SEQ ID NO 5734; and/or
e. SEQ ID NO 5763 and/or SEQ ID NO 5707 and/or SEQ ID NO 5735.

23. (canceled)

24. A method according to claim 1, wherein:
i) the step of assaying the methylation status of each CpG in the panel of one or more CpGs comprises:
a. performing a sequencing step to determine the sequence of each CpG;
b. hybridising DNA to an array comprising probes capable of discriminating between methylated and non-methylated forms of the CpGs and applying a detection system to the array so as to determine the methylation status of each CpG; and/or
c. performing a PCR step using methylation-specific primers, wherein the methylation status of the CpG is determined by the presence or absence of a PCR product; and/or
ii) the step of assaying the methylation status of each CpG in the panel of one or more CpGs comprises:
a. bisulphite converting the DNA; or
b. performing the steps of oxidising 5-methylcytosine bases (5mC) to 5-carboxylcytosine bases (5caC), preferably by ten-eleven translocation (TET), and/or oxidising 5-hydroxymethylcytosine bases (5hmC) to 5-carboxylcytosine bases (5caC), preferably by ten-eleven translocation (TET); followed by reducing 5-carboxylcytosine bases (5caC) to dihydrouracil bases (DHU), optionally with pyridine borane.

25. A method according to claim 24, further defined as comprising a step of stratifying the individual according to their risk of having CIN3 and/or cervical or according to their risk of CIN3 and/or cervical cancer development.

26. A method of treating or preventing CIN3 and/or cervical cancer in an individual, the method comprising administering one or more treatments to the individual determined to have CIN3 and/or cervical cancer by the step of performing the method of claim 1 on a sample from the individual.

27.-47. (canceled)

48. A method according to claim 9, further defined as comprising a step of stratifying the individual according to their risk of having CIN3 and/or cervical or according to their risk of CIN3 and/or cervical cancer development.

49. A method according to claim 48, wherein the individual is stratified as not having CIN3 and/or cancer or as having a low risk of CIN3 and/or cancer development, and wherein the individual is subjected to one or more treatments according to their stratification, the one or more treatments comprising a repeat method according to claim 10, preferably wherein the repeat method is performed about one year after the previous assay.

50. A method according to claim 48, wherein the individual is stratified as having a moderate risk of having CIN3 and/or cancer or as having a moderate risk of CIN3 and/or cancer development, and wherein the individual is subjected to one or more treatments according to their stratification, the one or more treatments comprising a test for human papilloma virus (HPV) status and wherein:
a. when the individual is HPV positive, a colposcopy, and optionally a transvaginal ultrasound and/or an endometrial biopsy to assess endometrium; or
b. when the individual is HPV negative, a repeat assay according to claim 48, preferably wherein the repeat assay is performed about one year after the previous assay.

51. A method according to claim 48, wherein the individual is stratified as having CIN3 and/or cancer or as having a high risk of CIN3 and/or cancer development, and wherein the individual is subjected to one or more treatments according to their stratification, the one or more treatments comprising a colposcopy, and wherein the colposcopy is negative, an endometrial biopsy and hysteroscopy.

52. A method according to claim 26, wherein the one or more treatments that the individual is subjected to are repeated on a monthly, three monthly, six monthly, yearly or two yearly basis following an initial administration.

53. A method of assaying methylation in an individual at multiple time points, the method comprising: (a) performing the assay according to claim 1 at a first time point; (b) performing the assay according claim 1 at one or more further time points; and (c) detecting differential methylation status between (a) and (b).

54. A method according to claim 53, wherein the further time points are monthly, three monthly, six monthly, yearly or two yearly basis following an initial assessment; and/or wherein one or more treatments are administered to the individual according to claim 51.

55. A method according to claim 1, wherein the sample is obtained from a tissue comprising epithelial cells, preferably wherein the sample is not obtained from ovarian or endometrial tissue, optionally wherein the sample is obtained from:
a. cervical tissue;
b. vaginal tissue;
c. cervicovaginal tissue;
d. buccal tissue;
preferably wherein the sample is obtained from cervical tissue, most preferably wherein the sample is obtained from tissue from a cervical smear.

56. An array for discriminating between methylated and non-methylated forms of CpGs; the array comprising oligonucleotide probes specific for a methylated form of each CpG in a CpG panel and oligonucleotide probes specific for a non-methylated form of each CpG in the panel; wherein the panel comprises at least 500 CpGs selected from the CpGs identified in SEQ ID NOs 1 to 5000 and identified at nucleotide positions 61 to 62, and identified in SEQ ID NOs 5001 to 5418 and denoted by CG, optionally provided that the array is not an Infinium MethylationEPIC BeadChip array or an Infinium HumanMethylation450, and/or provided that the number of CpG-specific oligonucleotide probes of the array is 482,000 or less, 480,000 or less, 450,000 or less, 440,000 or less, 430,000 or less, 420,000 or less, 410,000 or less, or 400,000 or less, and further optionally
wherein the panel comprises any panel of CpGs defined in a method of assaying from a sample from an individual the methylation status of a panel of CpGs identified in SEQ ID NOs 1 to 5000 wherein the CpGs are identified at nucleotide positions 61 to 62; and/or one or more CpGs selected from within panel of one or more Differentially Methylated Regions (DMRs) defined by SEQ ID NOs 5001 to 5418, wherein the CpGs are denoted by CG.

57. A hybridized array, wherein the array is obtainable by hybridizing to an array according to claim 56 to a group of oligonucleotides comprising any panel of CpGs defined in a method of assaying from a sample from an individual the methylation status of a panel of CpGs identified in SEQ ID NOs 1 to 5000 wherein the CpGs are identified at nucleotide positions 61 to 62; and/or one or more CpGs selected from within panel of one or more Differentially Methylated Regions (DMRs) defined by SEQ ID NOs 5001 to 5418, wherein the CpGs are denoted by CG.

58. A process for making the hybridized array according to claim 57, comprising contacting an array comprising oligonucleotide probes specific for a methylated form of each CpG in a CpG panel and oligonucleotide probes specific for a non-methylated form of each CpG in the panel; wherein the panel consists of at least 500 CpGs selected from the CpGs identified in SEQ ID NOs 1 to 5000 and identified at nucleotide positions 61 to 62, and identified in SEQ ID NOs 5001 to 5418 and denoted by CG in SEQ ID NO with a group of oligonucleotides comprising any panel of CpGs defined in the method of assaying from a sample from an individual the methylation status of a panel of CpGs identified in SEQ ID NOs 1 to 5000 wherein the CpGs are identified at nucleotide positions 61 to 62; and/or one or more CpGs selected from within panel of one or more Differentially Methylated Regions (DMRs) defined by SEQ ID NOs 5001 to 5418, wherein the CpGs are denoted by CG.

The application's sequence listing, which the Patent Office published only in electronic form, follows.

SEQUENCE LISTING (5814 sequences)

SEQ ID NO: 1 - DNA, 122 bp, Homo sapiens
  misc_feature (61)..(62): /note="This region represents a CpG dinucleotide"
  misc_feature (61)..(61): /note="Nucleotide may be methylated to form 5-methylcytosine"
tgttcgctccctgtccacctccccactccccaggatggaataggcacccctatgtgagggcgcaggtgtgcaaagccaggacgggtgggggtggcctttgtagaatgtgctggcggggaggg

SEQ ID NO: 2 - DNA, 122 bp, Homo sapiens
  misc_feature (61)..(62): /note="This region represents a CpG dinucleotide"
  misc_feature (61)..(61): /note="Nucleotide may be methylated to form 5-methylcytosine"
cgcggggccggactctgaacgcctcgcccgccaattcaaagggttggccctaactttgaacgccccacccaccacgtggaatgttccaaacgccccgccccccgcactgtcactcaccgcaa

SEQ ID NO: 3 - DNA, 122 bp, Homo sapiens
  misc_feature (61)..(62): /note="This region represents a CpG dinucleotide"
  misc_feature (61)..(61): /note="Nucleotide may be methylated to form 5-methylcytosine"
gtttgggtgcagtgtatttcttactgtgctttaaagaggaacacgttttaagaacccccgcgcggggcggagcagggcggagtccccggcgggaagggacccgagacctcggctgcgcctgc

SEQ ID NO: 4 - DNA, 122 bp, Homo sapiens
  misc_feature (61)..(62): /note="This region represents a CpG dinucleotide"
  misc_feature (61)..(61): /note="Nucleotide may be methylated to form 5-methylcytosine"
ttccaactatttcaaaaggtaaaattcattcttagctcccaggttgtccaaaaacagacgcgcaggatggccaagcaccagagtttatcgtttgcccataataatcgggttgattcggccaa

SEQ ID NO: 5 - DNA, 122 bp, Homo sapiens
  misc_feature (61)..(62): /note="This region represents a CpG dinucleotide"
  misc_feature (61)..(61): /note="Nucleotide may be methylated to form 5-methylcytosine"
tacgtaaacatctagcgcgctgacgctttccaagcacgcatgcgcagttgtgaaatattgcggagttttcggagtccaaaatggcttgaagttgctagaacagaatctttcaaagactcatt

SEQ ID NO: 6 - DNA, 122 bp, Homo sapiens
  misc_feature (61)..(62): /note="This region represents a CpG dinucleotide"
  misc_feature (61)..(61): /note="Nucleotide may be methylated to form 5-methylcytosine"
ggagatgacgccttcggacaagggtggggtccgcaggatcccaccaccgggcagagaacgcggcctccctgggactgtggtgtcagcgctgggctccaggggccgacgagggtgaggctggg

SEQ ID NO: 7 - DNA, 122 bp, Homo sapiens
  misc_feature (61)..(62): /note="This region represents a CpG dinucleotide"
  misc_feature (61)..(61): /note="Nucleotide may be methylated to form 5-methylcytosine"
ttgccagcatgacaaaaccccatctctactaaaaatactaacattaccagggcatggtggcgtgcccctgtaatcccagctactcaggaggctgaggcacaagaatcacttgaactctggag

SEQ ID NO: 8 - DNA, 122 bp, Homo sapiens
  misc_feature (61)..(62): /note="This region represents a CpG dinucleotide"
  misc_feature (61)..(61): /note="Nucleotide may be methylated to form 5-methylcytosine"
agttttccaggtcgaaagataggttcttcacgcttagtttccatcagataaactcaatgccgtccaaattttgcctcactaggggagcgacttgtattttttatcattgaattcagaggctt

SEQ ID NO: 9 - DNA, 122 bp, Homo sapiens
  misc_feature (61)..(62): /note="This region represents a CpG dinucleotide"
  misc_feature (61)..(61): /note="Nucleotide may be methylated to form 5-methylcytosine"
tatatatgtattcagtgtttatatgccacaagccactgagcaggaggaaaatctgggcagcggtgagcaaagctgaaacctcagagcaatgtttaaagcaatataagaaaataacaaagcaa

SEQ ID NO: 10 - DNA, 122 bp, Homo sapiens
  misc_feature (61)..(62): /note="This region represents a CpG dinucleotide"
  misc_feature (61)..(61): /note="Nucleotide may be methylated to form 5-methylcytosine"
accagtaaaatggtgaataattttaaagaacattttaaaacacacagagtttctattccacgagggcaggacctgtgaggataatttcctgtgttagagaaacactgtcctaaacaacaata

SEQ ID NO: 11 - DNA, 122 bp, Homo sapiens
  misc_feature (61)..(62): /note="This region represents a CpG dinucleotide"
  misc_feature (61)..(61): /note="Nucleotide may be methylated to form 5-methylcytosine"
agggctggacctgctgcccctgtgcgtgaccttcctgctgtgcttctgggaggtgcagtacggcatcctggccggggccctggtgtctctgctcatgctcctgcactctgcagccaggcctg

SEQ ID NO: 12 - DNA, 122 bp, Homo sapiens
  misc_feature (61)..(62): /note="This region represents a CpG dinucleotide"
  misc_feature (61)..(61): /note="Nucleotide may be methylated to form 5-methylcytosine"
gacagccgctgtcaacacaattgtatagacaatattattcttcagtaaataaaaacacaccgtcacaaaatatcaccacacattttcccctgaacattagtaaacatggcagtttgctctgc

SEQ ID NO: 13 - DNA, 122 bp, Homo sapiens
  misc_feature (61)..(62): /note="This region represents a CpG dinucleotide"
  misc_feature (61)..(61): /note="Nucleotide may be methylated to form 5-methylcytosine"
accagagccaggaaaggagcacttggcatcagagaagagaaaggcggaggtgacattcagcgccaaattagcagccgccacagccaaatattgtacttgcctccaatcttcttttatttttc

SEQ ID NO: 14 - DNA, 122 bp, Homo sapiens
  misc_feature (61)..(62): /note="This region represents a CpG dinucleotide"
  misc_feature (61)..(61): /note="Nucleotide may be methylated to form 5-methylcytosine"
ctgaaaacgatttgagaaagtactacaaaaatggctatgtctgctctgcttctctctctgcgtcatccttgtgcagagaaaagaacaatttcagctccttttggggatacagatgtgccctg

SEQ ID NO: 15 - DNA, 122 bp, Homo sapiens
  misc_feature (61)..(62): /note="This region represents a CpG dinucleotide"
  misc_feature (61)..(61): /note="Nucleotide may be methylated to form 5-methylcytosine"
ctccaaggtgagcaaaaattatgacaaatcatttacaacaaccttatatcaatgtgtcctcgcggcctctcgtgtgctttccttttacgaacatctcggccttctaatcttgaatgctgtct

SEQ ID NO: 16 - DNA, 122 bp, Homo sapiens
  misc_feature (61)..(62): /note="This region represents a CpG dinucleotide"
  misc_feature (61)..(61): /note="Nucleotide may be methylated to form 5-methylcytosine"
gggcggtcacaaggaaatatgattagaggacaaagggtgtggtctaatggtactgaactgcgggtggggggggcttagcaaaacctgtgtgttcacattcttcttggtatctctgtgtcttt

SEQ ID NO: 17 - DNA, 122 bp, Homo sapiens
  misc_feature (61)..(62): /note="This region represents a CpG dinucleotide"
  misc_feature (61)..(61): /note="Nucleotide may be methylated to form 5-methylcytosine"
cggctttacattcacctcccgcttaggctgtccttccatgacttgttcctcaactattagcgtctgatgcgcatacttctggaactaagacacgggaagaaaaccccacggggacgattcag

SEQ ID NO: 18 - DNA, 122 bp, Homo sapiens
  misc_feature (61)..(62): /note="This region represents a CpG dinucleotide"
  misc_feature (61)..(61): /note="Nucleotide may be methylated to form 5-methylcytosine"
tcgtgcccaggcgccctctccgccgcgctccctggtggccgctcgctagagcacgcgcgccgcagacctagggtatttgcggatcagcgtcctcgcccatctcatcctccacactccgcccc

SEQ ID NO: 19 - DNA, 122 bp, Homo sapiens
  misc_feature (61)..(62): /note="This region represents a CpG dinucleotide"
  misc_feature (61)..(61): /note="Nucleotide may be methylated to form 5-methylcytosine"
accgaccaaccttgggacagacaggcgccgtggggacagtggttgtttgggaaacagacacgccttctctggcaccacagcactctcggcctcgcgttgacctccccgcccctatggctagt

SEQ ID NO: 20 - DNA, 122 bp, Homo sapiens
  misc_feature (61)..(62): /note="This region represents a CpG dinucleotide"
  misc_feature (61)..(61): /note="Nucleotide may be methylated to form 5-methylcytosine"
acgcacaagcagagcctggaggacatgctggagaagcacgcgacgctggcgcgcgagggccgcctgtgcaagcgcgaggtgcagctgcgcctgtcctacgtgtacgactggtccgcgccgcc

SEQ ID NO: 21 - DNA, 122 bp, Homo sapiens
  misc_feature (61)..(62): /note="This region represents a CpG dinucleotide"
  misc_feature (61)..(61): /note="Nucleotide may be methylated to form 5-methylcytosine"
gcacccaactcataatgtcttaagtccaagcatttgctaggacttaagagaggcattaggcgtgcactgcataatgttgatgatgacacctactggcaggacaggattttgcaccctagttc

SEQ ID NO: 22 - DNA, 122 bp, Homo sapiens
  misc_feature (61)..(62): /note="This region represents a CpG dinucleotide"
  misc_feature (61)..(61): /note="Nucleotide may be methylated to form 5-methylcytosine"
ataattcaaaggagtggtgaaaaatctctatgaagatggtgcaaggggtggcctggaaaacggtgcttgttcatgctgccctcagttgaggctagttcctagaaagcctttctggaaatgtt

SEQ ID NO: 23 - DNA, 122 bp, Homo sapiens
  misc_feature (61)..(62): /note="This region represents a CpG dinucleotide"
  misc_feature (61)..(61): /note="Nucleotide may be methylated to form 5-methylcytosine"
aattttagataccacgttagtaaaatatcagattgagctgctaaatttctcccacccctacgtcattttgtgttttctgagcatcctagaggattgtgactgtatgcacaggacagaaacac

SEQ ID NO: 24 - DNA, 122 bp, Homo sapiens
  misc_feature (61)..(62): /note="This region represents a CpG dinucleotide"
  misc_feature (61)..(61): /note="Nucleotide may be methylated to form 5-methylcytosine"
tatggtttggctgtgttcccacacaaatctcatcttcagttgtagttcccataatccccacgtgttgtgggagagatccagaggtaattgaaccatggtacggtttcccccatgttattctc

SEQ ID NO: 25 - DNA, 122 bp, Homo sapiens
  misc_feature (61)..(62): /note="This region represents a CpG dinucleotide"
  misc_feature (61)..(61): /note="Nucleotide may be methylated to form 5-methylcytosine"
tctgcctccggtgctggtgtttgcctgccagggtcctgggcatggaccgaaagatctcagcgtgggcagagctgaggactgtgctctgccccatccagatggtgttcaagagggtccggctc

SEQ ID NO: 26 - DNA, 122 bp, Homo sapiens
  misc_feature (61)..(62): /note="This region represents a CpG dinucleotide"
  misc_feature (61)..(61): /note="Nucleotide may be methylated to form 5-methylcytosine"
tgcagtgtatttcttactgtgctttaaagaggaacacgttttaagaacccccgcgcggggcggagcagggcggagtccccggcgggaagggacccgagacctcggctgcgcctgcgccgacg

SEQ ID NO: 27 - DNA, 122 bp, Homo sapiens
  misc_feature (61)..(62): /note="This region represents a CpG dinucleotide"
  misc_feature (61)..(61): /note="Nucleotide may be methylated to form 5-methylcytosine"
ctcttcgtggaactccagttattcaccttttatggtgcttaaaaagtcacttacactctacgtttgtttttaagttttgtctctccatgtttcattttggatagcttctattacattgtcta

SEQ ID NO: 28 - DNA, 122 bp, Homo sapiens
  misc_feature (61)..(62): /note="This region represents a CpG dinucleotide"
  misc_feature (61)..(61): /note="Nucleotide may be methylated to form 5-methylcytosine"
tgcggactcggagcagctcggggctgcgcagcgggaaggctcgcctagtcggtccgcatccgtgtcgaccacctgtctggacaccacgaagatgccacccgttgggggcaaaaaggccaaga

SEQ ID NO: 29 - DNA, 122 bp, Homo sapiens
  misc_feature (61)..(62): /note="This region represents a CpG dinucleotide"
  misc_feature (61)..(61): /note="Nucleotide may be methylated to form 5-methylcytosine"
gtgcaattcagtttcttcagaatttcaaaatgattatatacatattttctctccctaatacgccccactgttaagtatgatttgttacaaatttgcagtagtctatattgtcattttgtgaa

SEQ ID NO: 30 - DNA, 122 bp, Homo sapiens
  misc_feature (61)..(62): /note="This region represents a CpG dinucleotide"
  misc_feature (61)..(61): /note="Nucleotide may be methylated to form 5-methylcytosine"
tctggacctgagaattgcacaggatggtttccaagagggtttacatgctcccccgccccccgtcccctgcccacagacctgctcttaccacatcaagatcttagttcaatgtatcgattcat

SEQ ID NO: 31 - DNA, 122 bp, Homo sapiens
  misc_feature (61)..(62): /note="This region represents a CpG dinucleotide"
  misc_feature (61)..(61): /note="Nucleotide may be methylated to form 5-methylcytosine"
gacacgcccagcactgggataggacccgcccgcccagtcctcattaaatatggcagcgagcggggccgacgtactgcggctgcgcaagttgaaactcctcctggcagctcctccccggcggg

SEQ ID NO: 32 - DNA, 122 bp, Homo sapiens
  misc_feature (61)..(62): /note="This region represents a CpG dinucleotide"
  misc_feature (61)..(61): /note="Nucleotide may be methylated to form 5-methylcytosine"
ctctttggcaagtggtttgtgcatcaggagaaactttccacctgcgagccgaaccggcgccgagtgcgtgtgtttctgcctttttttgttgtcgttgcctccacccctccccattcttctct

SEQ ID NO: 33 - DNA, 122 bp, Homo sapiens
  misc_feature (61)..(62): /note="This region represents a CpG dinucleotide"
  misc_feature (61)..(61): /note="Nucleotide may be methylated to form 5-methylcytosine"
aggtgagaaggataaattccatttacataaattgctgtctcttctcatgctgtcccctcacgcttccccaaatttcttataggtgtctgtgatcaaagttttgggattcatgttgcagagct

SEQ ID NO: 34 - DNA, 122 bp, Homo sapiens
  misc_feature (61)..(62): /note="This region represents a CpG dinucleotide"
  misc_feature (61)..(61): /note="Nucleotide may be methylated to form 5-methylcytosine"
tcttaaagtttggtggcaaatgataaacccttatcattttgtgaacacagctgccaaactcgattgattaacaggcttttgtttattctgggctggcaaatacacacacgttttaccttaag

SEQ ID NO: 35 - DNA, 122 bp, Homo sapiens
  misc_feature (61)..(62): /note="This region represents a CpG dinucleotide"
  misc_feature (61)..(61): /note="Nucleotide may be methylated to form 5-methylcytosine"
gggaggaatattcatatgttttatgggaacaggcagtgaacttctccaaactggtaataccgctttccttttggtccttttaggacttcttctactcatcgtcatggagatcgtcaactgtc

SEQ ID NO: 36 - DNA, 122 bp, Homo sapiens
  misc_feature (61)..(62): /note="This region represents a CpG dinucleotide"
  misc_feature (61)..(61): /note="Nucleotide may be methylated to form 5-methylcytosine"
gtacgaggaggcaaacacataaggcacgaggcgagaaacgtgcagagcggaggacgaggccgacggacggggaggctgggggggacactaggcagcctggccaactctgcttgtccccctgc

SEQ ID NO: 37 - DNA, 122 bp, Homo sapiens
  misc_feature (61)..(62): /note="This region represents a CpG dinucleotide"
  misc_feature (61)..(61): /note="Nucleotide may be methylated to form 5-methylcytosine"
atttttcaaagtaattctttttttaaaaaaaactctttaacttagttgcataattacatacgtgactaggataatagtctatgaccatgattggtgaaaaggtagtgtattttagtattaac

SEQ ID NO: 38 - DNA, 122 bp, Homo sapiens
  misc_feature (61)..(62): /note="This region represents a CpG dinucleotide"
  misc_feature (61)..(61): /note="Nucleotide may be methylated to form 5-methylcytosine"
gaatcacattttggagaatcagacttctgacttattaatagaatttcccccctccatccccgtagacagcccccattccacttcagccccacacctatactcacacagttgtctacagagga

SEQ ID NO: 39 - DNA, 122 bp, Homo sapiens
  misc_feature (61)..(62): /note="This region represents a CpG dinucleotide"
  misc_feature (61)..(61): /note="Nucleotide may be methylated to form 5-methylcytosine"
ttcctcttcctgtgatccccacgatggtgaattcagcaacataaatagctcctgcgcacacgccaggcagggatggcgaagaacacacaagaaccctcactgcctccaccaaaagggctcag

SEQ ID NO: 40 - DNA, 122 bp, Homo sapiens
  misc_feature (61)..(62): /note="This region represents a CpG dinucleotide"
  misc_feature (61)..(61): /note="Nucleotide may be methylated to form 5-methylcytosine"
gacccgtggggttcccaagctttcctgttattttttttttcttttctttttagacagtctcgctctgtcgctaaggtaaagtgcagtggtgtgacctcggtttctgtaagctccgtctccca

SEQ ID NO: 41 - DNA, 122 bp, Homo sapiens
  misc_feature (61)..(62): /note="This region represents a CpG dinucleotide"
  misc_feature (61)..(61): /note="Nucleotide may be methylated to form 5-methylcytosine"
caataagggtagcacctaaatgagttttcaaatggacagcagtaacaacaacatcaacttcgtatttaaccacattgctctgtctgtcccatgcaggaagcagggaaaggaggggctcaaga

SEQ ID NO: 42 - DNA, 122 bp, Homo sapiens
  misc_feature (61)..(62): /note="This region represents a CpG dinucleotide"
  misc_feature (61)..(61): /note="Nucleotide may be methylated to form 5-methylcytosine"
agctgggcctctcgctgcttggctggctgtccagaagagcctgccatggaaccaccccaccgtgcggcccggaggcctgtggttgagggccttccgctgagagctctgggaagctgaagaga

SEQ ID NO: 43 - DNA, 122 bp, Homo sapiens
  misc_feature (61)..(62): /note="This region represents a CpG dinucleotide"
  misc_feature (61)..(61): /note="Nucleotide may be methylated to form 5-methylcytosine"
gaccagcctggccaacatggtgaaaccctgtctctactaaaaatacaaaaattagccgggcgtggtggcagctattctggaggctgagacaggacaatagcttgaaccaggaggcggaggtt

SEQ ID NO: 44 - DNA, 122 bp, Homo sapiens
  misc_feature (61)..(62): /note="This region represents a CpG dinucleotide"
  misc_feature (61)..(61): /note="Nucleotide may be methylated to form 5-methylcytosine"
ctctcaaacttactgaattcttactgttttgtaactagcagtaccaaatcccaggacagacgtgaagtttctgtcattcagtttcagagaacagcatgtatattgggccattgtttttcact

SEQ ID NO: 45 - DNA, 122 bp, Homo sapiens
  misc_feature (61)..(62): /note="This region represents a CpG dinucleotide"
  misc_feature (61)..(61): /note="Nucleotide may be methylated to form 5-methylcytosine"
gagatgctggtaatatgatgcaggcaaagtaggcccagatccctggcccgaaagaattcacgtactatttatgtattttagtcagcctgtcttttcctcctacattgcctctgccacttcaa

SEQ ID NO: 46 - DNA, 122 bp, Homo sapiens
  misc_feature (61)..(62): /note="This region represents a CpG dinucleotide"
  misc_feature (61)..(61): /note="Nucleotide may be methylated to form 5-methylcytosine"
ttgaataatcagtaagatttttgcctgaaggttttcacaaaatatgcccctttatccagtcgaacatggatgctaagcatggccagtgtgactcatcctgttgcttcaaaggtaaatgtttg

SEQ ID NO: 47 - DNA, 122 bp, Homo sapiens
  misc_feature (61)..(62): /note="This region represents a CpG dinucleotide"
  misc_feature (61)..(61): /note="Nucleotide may be methylated to form 5-methylcytosine"
ccacacaggcctctccctcggtgcggtagcgagggttgcgggcccaaacgcccgcgcccacggaggcgcctgcgacgactagaagcttccacagccatatgggggcaaagacggcccagtag

SEQ ID NO: 48 - DNA, 122 bp, Homo sapiens
  misc_feature (61)..(62): /note="This region represents a CpG dinucleotide"
  misc_feature (61)..(61): /note="Nucleotide may be methylated to form 5-methylcytosine"
gctgcagccgccacggagacaatggacgcgggagccgccccgcagaagcacagtaggtgccgctcctgccgctgcgccgctgccaaccgggatgcgcgggtggacgcgcgggggcgccgcag

SEQ ID NO: 49 - DNA, 122 bp, Homo sapiens
  misc_feature (61)..(62): /note="This region represents a CpG dinucleotide"
  misc_feature (61)..(61): /note="Nucleotide may be methylated to form 5-methylcytosine"
ggacccgaaagagacccgaggtgacttcgggctgggcaggacacccccgggagttgccagcggctctcagcgggcgcctctaggaccccttgtcactgcgagcagcgcctgctctggggagg

SEQ ID NO: 50 - DNA, 122 bp, Homo sapiens
  misc_feature (61)..(62): /note="This region represents a CpG dinucleotide"
  misc_feature (61)..(61): /note="Nucleotide may be methylated to form 5-methylcytosine"
cggagaggacgaccgccaccggtgcaaccaggtccccgcgcccctgcccggcctctggggcgcccaagcgggccgtcctcaccgcggcaactccacgcccgcccctccagcccaacctcaca

SEQ ID NO: 51 - DNA, 122 bp, Homo sapiens
  misc_feature (61)..(62): /note="This region represents a CpG dinucleotide"
  misc_feature (61)..(61): /note="Nucleotide may be methylated to form 5-methylcytosine"
gtcaggttgtaggttaattccccaactcaaacttccccgatcaaacattgtcaggccaggcgactgttttggtttatggatgataaagtatagggccaaggtaggccaagagtagaagacag

SEQ ID NO: 52 - DNA, 122 bp, Homo sapiens
  misc_feature (61)..(62): /note="This region represents a CpG dinucleotide"
  misc_feature (61)..(61): /note="Nucleotide may be methylated to form 5-methylcytosine"
attagggaggcagggcacagtggctcacacttgtaatcccagcactttgggaggccaaggcgggaggataacttgagcctatgtagttgaagaccaacctgggcaacactgtgagacccccg

SEQ ID NO: 53 - DNA, 122 bp, Homo sapiens
  misc_feature (61)..(62): /note="This region represents a CpG dinucleotide"
  misc_feature (61)..(61): /note="Nucleotide may be methylated to form 5-methylcytosine"
ggaactcaggagccagaattctgctagggtgtagactgctcacaagatatgcaacttccccgcttgcttacccctacagataacatcactattgtggatctgccttttgagaaatcttttca

SEQ ID NO: 54 - DNA, 122 bp, Homo sapiens
  misc_feature (61)..(62): /note="This region represents a CpG dinucleotide"
  misc_feature (61)..(61): /note="Nucleotide may be methylated to form 5-methylcytosine"
gcctcaccgaggaaatgccaatttgaaaaacagaatgctattgtccactgactgagttttcgcgagggaccacatccccacctcacccccgcctccagggcttgtaaggcactgacaaccaa

SEQ ID NO: 55 - DNA, 122 bp, Homo sapiens
  misc_feature (61)..(62): /note="This region represents a CpG dinucleotide"
  misc_feature (61)..(61): /note="Nucleotide may be methylated to form 5-methylcytosine"
gcgcagcagtgagaatggactgagtgccactgatgtgtgtgctccatggctccgtggctccgtggctccgtggctcagtggctcaatggctataatggctagttttgttacatattttcacc

SEQ ID NO: 56 - DNA, 122 bp, Homo sapiens
  misc_feature (61)..(62): /note="This region represents a CpG dinucleotide"
  misc_feature (61)..(61): /note="Nucleotide may be methylated to form 5-methylcytosine"
atggggacgccaggctgcctacctcagactcagaaggtacgattacgtgcatacactctgcgaactgaagggctgtacaaatgcaagggcttaataacagccaacagtttaatattcgttga

SEQ ID NO: 57 - DNA, 122 bp, Homo sapiens
  misc_feature (61)..(62): /note="This region represents a CpG dinucleotide"
  misc_feature (61)..(61): /note="Nucleotide may be methylated to form 5-methylcytosine"
caccaatgggatcagcggctgcgcagcgtcaggtgataataagcaggcttggtccctgctcgccgggctggtgggagggggaaagggcagagggtctcccagggagctacacagatgtcctc

SEQ ID NO: 58 - DNA, 122 bp, Homo sapiens
  misc_feature (61)..(62): /note="This region represents a CpG dinucleotide"
  misc_feature (61)..(61): /note="Nucleotide may be methylated to form 5-methylcytosine"
cactgtctactctgatagcctgaaggaaacagggaccttagtcctacaattaccagaaaccgaattctgccaacgagctctatataagcttgggggagaatcccaatcttaagatgaggata

SEQ ID NO: 59 - DNA, 122 bp, Homo sapiens
  misc_feature (61)..(62): /note="This region represents a CpG dinucleotide"
  misc_feature (61)..(61): /note="Nucleotide may be methylated to form 5-methylcytosine"
accaatcgtctgtggcaaatggagaagtatcgatgcccttcccccttctgattctatttacggctaggtttttaaaagcagcaataaaacaaatgtcgactctttgggggtttactgggtga

SEQ ID NO: 60 - DNA, 122 bp, Homo sapiens
  misc_feature (61)..(62): /note="This region represents a CpG dinucleotide"
  misc_feature (61)..(61): /note="Nucleotide may be methylated to form 5-methylcytosine"
tcccggctgccaaggaggctgcttccatgccccgcagccagctcctgtctggctgtgcagcgcgtcgctgctgcccctggtgagacgatgttcccagctgagcagcgcaagaagagaggcaa

SEQ ID NO: 61 - DNA, 122 bp, Homo sapiens
  misc_feature (61)..(62): /note="This region represents a CpG dinucleotide"
  misc_feature (61)..(61): /note="Nucleotide may be methylated to form 5-methylcytosine"
atagaaatagtcttggaatctcaaaagactagataactctgtcaatacaaactgagcagccgccactaccttattttatgttctttgaatttataaatgaaaaggtcactcaagttgttttt

SEQ ID NO: 62 - DNA, 122 bp, Homo sapiens
  misc_feature (61)..(62): /note="This region represents a CpG dinucleotide"
  misc_feature (61)..(61): /note="Nucleotide may be methylated to form 5-methylcytosine"
tagggctggaaacccgccgccacagcgggctagaggtcgtccccgcccgcaacatatgcgcgaaggaaagtgctacgaacgtcaaatggccgccccccgccgacgccatctgctctgcgaag

SEQ ID NO: 63 - DNA, 122 bp, Homo sapiens
  misc_feature (61)..(62): /note="This region represents a CpG dinucleotide"
  misc_feature (61)..(61): /note="Nucleotide may be methylated to form 5-methylcytosine"
gccgtgccccggggacctgcgcgagatgatcagcatgtacttgcccgccggcgaggggggcgacccggcggcggcagcagcggccgcggcgcagagccggctgcactcgctgccgcagcact

SEQ ID NO: 64 - DNA, 122 bp, Homo sapiens
  misc_feature (61)..(62): /note="This region represents a CpG dinucleotide"
  misc_feature (61)..(61): /note="Nucleotide may be methylated to form 5-methylcytosine"
tcagaaaactttcttatgtctcataatttatgtctttgcagagccagccagccactttgtcggtcatcagggcagataatccatgggtgccaagaacaatgtgactgagtttgttttatttg

SEQ ID NO: 65 - DNA, 122 bp, Homo sapiens
  misc_feature (61)..(62): /note="This region represents a CpG dinucleotide"
  misc_feature (61)..(61): /note="Nucleotide may be methylated to form 5-methylcytosine"
aatccttaataaaaacttgctgattttgcagctctggtggggcattacggacctacggcccgtaatgacctggtggcccagctgtaaaattcttctctttgtactctttctctctatttctc

SEQ ID NO: 66 - DNA, 122 bp, Homo sapiens
  misc_feature (61)..(62): /note="This region represents a CpG dinucleotide"
  misc_feature (61)..(61): /note="Nucleotide may be methylated to form 5-methylcytosine"
ttaacaaataataatgtcttagtgctataaggcattcatgcatgcatgcattcattcattcgttcatttttttttttgagacagagtctcactctgttgcccaggctggtgtgcagtggtac

SEQ ID NO: 67 - DNA, 122 bp, Homo sapiens
  misc_feature (61)..(62): /note="This region represents a CpG dinucleotide"
  misc_feature (61)..(61): /note="Nucleotide may be methylated to form 5-methylcytosine"
gtcgtcatattcctcccggtcccgagtgtcagagcagactactgaccgagacactactttcggcatggtttccaggagcaacctgaaaaactctacgcaaagaagagggtcgcgccgaaatg

SEQ ID NO: 68 - DNA, 122 bp, Homo sapiens
  misc_feature (61)..(62): /note="This region represents a CpG dinucleotide"
  misc_feature (61)..(61): /note="Nucleotide may be methylated to form 5-methylcytosine"
gggtcccggcctctgggttttagggagcgcgaatgggtctccgacagcaacgggagcagccggtggcgcctcaggctgcggtggcaacgagcccgactgcactacggctttgcgggaccgcg

SEQ ID NO: 69 - DNA, 122 bp, Homo sapiens
  misc_feature (61)..(62): /note="This region represents a CpG dinucleotide"
  misc_feature (61)..(61): /note="Nucleotide may be methylated to form 5-methylcytosine"
gagggccggcgaggcgccgggcatgtgcggcagggtggcgctgtcgaagcctgcccctctcggtgggcggcagccccccggatcacttccctcagatgtccccaggccctgtccctgggcgt

SEQ ID NO: 70 - DNA, 122 bp, Homo sapiens
  misc_feature (61)..(62): /note="This region represents a CpG dinucleotide"
  misc_feature (61)..(61): /note="Nucleotide may be methylated to form 5-methylcytosine"
gtaatttacagccagtcacagtggctcacgcctgtattcccagggttttgagaggccaagcggggaggattgcttgagcctagcagttggagaccagcctgggcaagacagtgagaccccat

SEQ ID NO: 71 - DNA, 122 bp, Homo sapiens
  misc_feature (61)..(62): /note="This region represents a CpG dinucleotide"
  misc_feature (61)..(61): /note="Nucleotide may be methylated to form 5-methylcytosine"
tatagccctcctgactctgaaactctggaggtggggcccagccatctgtttaaacaagcccgccaggggattcagatgcaccctcaagtttgagaacccttgttctggagcactatttggcc

SEQ ID NO: 72 - DNA, 122 bp, Homo sapiens
  misc_feature (61)..(62): /note="This region represents a CpG dinucleotide"
  misc_feature (61)..(61): /note="Nucleotide may be methylated to form 5-methylcytosine"
acttagaagactcgccctccttaccgtgcccccttgtcttgtgtgcaataaatatcagcgcgcccagccgttctgggccactaccagtctccatgtcttgatggtagtggtctcccgggccc

SEQ ID NO: 73 - DNA, 122 bp, Homo sapiens
  misc_feature (61)..(62): /note="This region represents a CpG dinucleotide"
  misc_feature (61)..(61): /note="Nucleotide may be methylated to form 5-methylcytosine"
gctattctcaagctgatcgacatgagagatttcaacacatgtgtcagcagccagactaaacgtggaagaaaatcagaagcatttgaaactgtaaagctcaataactttcctcctcctgagaa

SEQ ID NO: 74 - DNA, 122 bp, Homo sapiens
  misc_feature (61)..(62): /note="This region represents a CpG dinucleotide"
  misc_feature (61)..(61): /note="Nucleotide may be methylated to form 5-methylcytosine"
acctttcaacctactctacgtggccagtattatcatgatcttaaaacccaaccaaagcatcgcaaaaaagaaaagagcaggccgatatctgctttttttatttttattttttatttttgagt

SEQ ID NO: 75 - DNA, 122 bp, Homo sapiens
  misc_feature (61)..(62): /note="This region represents a CpG dinucleotide"
  misc_feature (61)..(61): /note="Nucleotide may be methylated to form 5-methylcytosine"
atgccccagcgagtcaagcgggcagacgagtggcgatctcggcactagcagcagcagcagcgccgggctgtccccgggctccgactcggacagcagcggcgtggtgtgtggcggccgcggag

SEQ ID NO: 76 - DNA, 122 bp, Homo sapiens
  misc_feature (61)..(62): /note="This region represents a CpG dinucleotide"
  misc_feature (61)..(61): /note="Nucleotide may be methylated to form 5-methylcytosine"
ttaaggggtgggattactgattcaaacttctgctaaccactgtcatactaggtaacatggcgtaatggctaagagaacagtttctatgcaagacaatttaggttccaatcctagctccacca

SEQ ID NO: 77 - DNA, 122 bp, Homo sapiens
  misc_feature (61)..(62): /note="This region represents a CpG dinucleotide"
  misc_feature (61)..(61): /note="Nucleotide may be methylated to form 5-methylcytosine"
gggcccctggctccgggaccagggctccggagggtgccgggcggggagcggaacagggaacgggctggtggcggccccaagcgggagggacggaccgacacgcggccccctggcggccttgc

SEQ ID NO: 78 - DNA, 122 bp, Homo sapiens
  misc_feature (61)..(62): /note="This region represents a CpG dinucleotide"
  misc_feature (61)..(61): /note="Nucleotide may be methylated to form 5-methylcytosine"
tttgttgtcaaatgagcatgtcaaatgaactccaaccactgcaaggcaaaatgaaacccacgctacctaaaaggtgtagatatcagtccatgtaattgaaatctgtcgacttgggggtaagt

SEQ ID NO: 79 - DNA, 122 bp, Homo sapiens
  misc_feature (61)..(62): /note="This region represents a CpG dinucleotide"
  misc_feature (61)..(61): /note="Nucleotide may be methylated to form 5-methylcytosine"
aagctgtttagcttttgacctcttgcataacagatattacttaacataaatatatcactgcgccctgattcaaggggcttctaagaaacattggctgcagaatgagagtgtattggccccac

SEQ ID NO: 80 - DNA, 122 bp, Homo sapiens
  misc_feature (61)..(62): /note="This region represents a CpG dinucleotide"
  misc_feature (61)..(61): /note="Nucleotide may be methylated to form 5-methylcytosine"
atgaggacgtggcaagaagatgacatgtatgagaaccaaaaaacagctgtcgccaaacaccgactctgtcgttgccttgatcttgaacttccagcctccagaactatgagaaataaaattct

SEQ ID NO: 81 - DNA, 122 bp, Homo sapiens
  misc_feature (61)..(62): /note="This region represents a CpG dinucleotide"
  misc_feature (61)..(61): /note="Nucleotide may be methylated to form 5-methylcytosine"
tttctgcagtggtgactgagctcttcaaatggcttgccatttctcaaaatcatttacatccgtatttaggtagtaagacatagtttagatatttatactgtgttgtgctagtggctgttaac

SEQ ID NO: 82 - DNA, 122 bp, Homo sapiens
  misc_feature (61)..(62): /note="This region represents a CpG dinucleotide"
  misc_feature (61)..(61): /note="Nucleotide may be methylated to form 5-methylcytosine"
tccacagtcatcaggtcactttcgttctctgaaacttaatccagtcttgttttaaacttccgtgtggcttaagagatttagaatctgtgtgtgtgtgtgtgtgtgtgtgtgtgtgtgtgtgt

SEQ ID NO: 83 - DNA, 122 bp, Homo sapiens
  misc_feature (61)..(62): /note="This region represents a CpG dinucleotide"
  misc_feature (61)..(61): /note="Nucleotide may be methylated to form 5-methylcytosine"
gtgtgcgtgtgcgtgtgctcagcctcagcgtgaggggcacctgctcgtctgggctcacagcgaaggcagcctcgccgcgagctgccgctgccgctgctgccgccactggtgttgccgctctc

SEQ ID NO: 84 - DNA, 122 bp, Homo sapiens
  misc_feature (61)..(62): /note="This region represents a CpG dinucleotide"
  misc_feature (61)..(61): /note="Nucleotide may be methylated to form 5-methylcytosine"
ttcctcttggttgtctgggacaagctccttctgggctactggagcacccggggtaagtgccgcaaaatcccgcgaagagcgccagtgagaggtgaagccggctaggcttctgggaccggtgg

SEQ ID NO: 85 - DNA, 122 bp, Homo sapiens
  misc_feature (61)..(62): /note="This region represents a CpG dinucleotide"
  misc_feature (61)..(61): /note="Nucleotide may be methylated to form 5-methylcytosine"
aatagactgaggatgttagcatcccaaactaaattttaatacctcacaaattaaaataaacgttaaaagattaccaaaagttatttaagttgttggtaaagtatgattgcaaatttactggt

SEQ ID NO: 86 - DNA, 122 bp, Homo sapiens
  misc_feature (61)..(62): /note="This region represents a CpG dinucleotide"
  misc_feature (61)..(61): /note="Nucleotide may be methylated to form 5-methylcytosine"
tattcattgaactttctatgtatgtggggcaaaatattacatccacaacacagaaccaaacgtggtgatgacactgttgtgacactgttgcatgctgacacaaaacctcacagcatctagtc

SEQ ID NO: 87 - DNA, 122 bp, Homo sapiens
  misc_feature (61)..(62): /note="This region represents a CpG dinucleotide"
  misc_feature (61)..(61): /note="Nucleotide may be methylated to form 5-methylcytosine"
cggcgacggtggcggagccgcagagcgagctagagagcgagagcggtgagactctgcggacgtcttcccgcccgccgcgctccgccccacccagcctccgcagcctcgggccggatcgcccg

SEQ ID NO: 88 - DNA, 122 bp, Homo sapiens
  misc_feature (61)..(62): /note="This region represents a CpG dinucleotide"
  misc_feature (61)..(61): /note="Nucleotide may be methylated to form 5-methylcytosine"
tcaggctggagcgcagtggtgcagtcatggcttattgcagcttcaattcccaggctcaagcgatcctcccacttcagcctccagagtagctgggaaaatgtcataatttttgacccagtaat

SEQ ID NO: 89 - DNA, 122 bp, Homo sapiens
  misc_feature (61)..(62): /note="This region represents a CpG dinucleotide"
  misc_feature (61)..(61): /note="Nucleotide may be methylated to form 5-methylcytosine"
gcctcgcgggtaaggccaagccacgcgggtaaggccaagccaatccgttacacaccagtgcgcctgcgcacctttgacgtcactgaacctgtgccttcactgcatctgcagctccagcctcc

SEQ ID NO: 90 - DNA, 122 bp, Homo sapiens
  misc_feature (61)..(62): /note="This region represents a CpG dinucleotide"
  misc_feature (61)..(61): /note="Nucleotide may be methylated to form 5-methylcytosine"
tccgcccccagcccaaccctcgggcccacctcagcccgacccgggttccgcctacgtccccgcccccgactccgccctcagctccgacctcgactccgcccccaggcccacctcagcgcgcc

SEQ ID NO: 91 - DNA, 122 bp, Homo sapiens
  misc_feature (61)..(62): /note="This region represents a CpG dinucleotide"
  misc_feature (61)..(61): /note="Nucleotide may be methylated to form 5-methylcytosine"
caagagcatcgagctagagtcggtgcgcggcaccaaggagtccctggagcggcagctcagcgacatcgaggagcgccacaaccacgacctcagcagctaccaggtaggaaccgcggctgcgc

SEQ ID NO: 92 - DNA, 122 bp, Homo sapiens
  misc_feature (61)..(62): /note="This region represents a CpG dinucleotide"
  misc_feature (61)..(61): /note="Nucleotide may be methylated to form 5-methylcytosine"
gaggctgaggcagagaattgcttgaactcgggaggcggaggttgcagtgagccgagatcgcgccatttgctctccagcctgggaaacagagcaagactccgtctcagaaaaaaaaaaaagac

SEQ ID NO: 93 - DNA, 122 bp, Homo sapiens
  misc_feature (61)..(62): /note="This region represents a CpG dinucleotide"
  misc_feature (61)..(61): /note="Nucleotide may be methylated to form 5-methylcytosine"
aagaggaagatagtcatttgcctttttctgagaacacagcgtttatcatcttgctattgccgttgagagtagtttgctcaaatgaatttaaaaagtaaactatttttcagaaatgttctcag

SEQ ID NO: 94 - DNA, 122 bp, Homo sapiens
  misc_feature (61)..(62): /note="This region represents a CpG dinucleotide"
  misc_feature (61)..(61): /note="Nucleotide may be methylated to form 5-methylcytosine"
gaaataactcacttctcgcagtttactcctggggccgagacctgggaaacatcccctgctcgcgctctcggcgctcggtctcccgtttcggcctccctgggcttcgctccccaccgcgttca

SEQ ID NO: 95 - DNA, 122 bp, Homo sapiens
  misc_feature (61)..(62): /note="This region represents a CpG dinucleotide"
  misc_feature (61)..(61): /note="Nucleotide may be methylated to form 5-methylcytosine"
tcctccagccagagtcggtgggactggctgcgctgccctgaagtggttctccaagcagcgcggagggtggcggacggcggacggagcccaggggccgcgtcgggtggggaaacccgaactcg

SEQ ID NO: 96 - DNA, 122 bp, Homo sapiens
  misc_feature (61)..(62): /note="This region represents a CpG dinucleotide"
  misc_feature (61)..(61): /note="Nucleotide may be methylated to form 5-methylcytosine"
cgccgccgcgcgggggtggagctgagctgaagtcactggcggagcgggcgcgggcgctggcgggcgacgcgggagggagggcaggcgctgccgggactccgggcgccgcgtcccgcggccga

SEQ ID NO: 97 - DNA, 122 bp, Homo sapiens
  misc_feature (61)..(62): /note="This region represents a CpG dinucleotide"
  misc_feature (61)..(61): /note="Nucleotide may be methylated to form 5-methylcytosine"
gggcccaacggagcggacggaagcacggggcgcggggctggacccccggacaccccgtcccgcgcccccaccccctgtaggcgccgcgcagcacctacctgcgccctcccggaccccgcgcg

SEQ ID NO: 98 - DNA, 122 bp, Homo sapiens
  misc_feature (61)..(62): /note="This region represents a CpG dinucleotide"
  misc_feature (61)..(61): /note="Nucleotide may be methylated to form 5-methylcytosine"
acgcgacccgagctccctgtctgcgctctaggcagcaattgcggcctgggccgccgcgtccggctgtggcctaggtggtgggaagtactttctaccctcgccaagcacaacctgaatgcgga

SEQ ID NO: 99 - DNA, 122 bp, Homo sapiens
  misc_feature (61)..(62): /note="This region represents a CpG dinucleotide"
  misc_feature (61)..(61): /note="Nucleotide may be methylated to form 5-methylcytosine"
gtgtgctcagcctcagcgtgaggggcacctgctcgtctgggctcacagcgaaggcagcctcgccgcgagctgccgctgccgctgctgccgccactggtgttgccgctctcaggcgccaggct

SEQ ID NO: 100 - DNA, 122 bp, Homo sapiens
  misc_feature (61)..(62): /note="This region represents a CpG dinucleotide"
  misc_feature (61)..(61): /note="Nucleotide may be methylated to form 5-methylcytosine"
ttggcgtccggaaacaagtgttttccgctcagtcatggcggcttcgccagtcgaacagagcgaaagggctctgggcgaccctgcgacttccaccagaccgcgagcccggagcaccggcggag

SEQ ID NO: 101 - DNA, 122 bp, Homo sapiens
  misc_feature (61)..(62): /note="This region represents a CpG dinucleotide"
  misc_feature (61)..(61): /note="Nucleotide may be methylated to form 5-methylcytosine"
tgctcccaacttggatctgtcccgctcgaggacgcagagctgtgtctggagcgcggtcaccgccctctacagctggcttccccaacccggttccccctcccttcccctccgccctcgctccc

SEQ ID NO: 102 - DNA, 122 bp, Homo sapiens
  misc_feature (61)..(62): /note="This region represents a CpG dinucleotide"
  misc_feature (61)..(61): /note="Nucleotide may be methylated to form 5-methylcytosine"
tggctgccagagcgagtgaggggcgcagaggcggcagagagcggagagccccggtgtctccgcgagggcggcggcggccagcagacggcgatcgaggcgcgcgccacggcacggccagcgca

SEQ ID NO: 103 - DNA, 122 bp, Homo sapiens
  misc_feature (61)..(62): /note="This region represents a CpG dinucleotide"
  misc_feature (61)..(61): /note="Nucleotide may be methylated to form 5-methylcytosine"
cgcccgcaacatatgcgcgaaggaaagtgctacgaacgtcaaatggccgccccccgccgacgccatctgctctgcgaagcagaaacggcggcagctgcgcgcccagtccctccgcccgcgcc

SEQ ID NO: 104 - DNA, 122 bp, Homo sapiens
  misc_feature (61)..(62): /note="This region represents a CpG dinucleotide"
  misc_feature (61)..(61): /note="Nucleotide may be methylated to form 5-methylcytosine"
cacttcaagaggaatgagtgcatacgtccaccaaaggcatgtgcaagaatgtccatagcacgtttattcgtagtagtaaaaaactggtaacctaaatgtccatcagcagttgagtggctaaa

SEQ ID NO: 105 - DNA, 122 bp, Homo sapiens
  misc_feature (61)..(62): /note="This region represents a CpG dinucleotide"
  misc_feature (61)..(61): /note="Nucleotide may be methylated to form 5-methylcytosine"
gggcttaaaggaatgaagccatggaccgcagcgccgagtgttacagcttgattagagaaacgtgtggacccaaagagtgtgcggcgacaagatttattaaagcgaaagccaaagtaaaacga

SEQ ID NO: 106 - DNA, 122 bp, Homo sapiens
  misc_feature (61)..(62): /note="This region represents a CpG dinucleotide"
  misc_feature (61)..(61): /note="Nucleotide may be methylated to form 5-methylcytosine"
gcccagcagatgagaaattggctgtctgcaaccaatcagactgattgcaggccgagtcctcgtttgcacagaagtataactttgtaacttcaccttagcctctgattggttgcaaaaagcaa

SEQ ID NO: 107 - DNA, 122 bp, Homo sapiens
  misc_feature (61)..(62): /note="This region represents a CpG dinucleotide"
  misc_feature (61)..(61): /note="Nucleotide may be methylated to form 5-methylcytosine"
tctgattcttgagacagagactcatgggtactatcgtctttgtcaagctcatcaaggatacggtcctaaaatcaaaagacggaaaacaggggtcataattatatgattaggaaaaaaaagaa

SEQ ID NO: 108 - DNA, 122 bp, Homo sapiens
  misc_feature (61)..(62): /note="This region represents a CpG dinucleotide"
  misc_feature (61)..(61): /note="Nucleotide may be methylated to form 5-methylcytosine"
gagagcaaccccttcaccgaaatagccatgagcagctgcaggtacaacgggggcgtcatgcggccgctcagcaacttgagcgcgtcccgccggaacctgcacgagatggactcagaggcgca

SEQ ID NO: 109 - DNA, 122 bp, Homo sapiens
  misc_feature (61)..(62): /note="This region represents a CpG dinucleotide"
  misc_feature (61)..(61): /note="Nucleotide may be methylated to form 5-methylcytosine"
gtgaaatgtgcaccctggaattacctttcccctttcggggataatttccctcctccctcgcgtgacacagctaagttttcgcggagctggccgcgctttgcacgcacaactcgggatggatg

SEQ ID NO: 110 - DNA, 122 bp, Homo sapiens
  misc_feature (61)..(62): /note="This region represents a CpG dinucleotide"
  misc_feature (61)..(61): /note="Nucleotide may be methylated to form 5-methylcytosine"
ggcgccggcagcttcgcgccggcggctggaagcgggcgggctgcacgggcggctcgagtgcggggaccccagcccctcgccctcgtgagcgccgcccctgccacctgctgccaagtcaccgg

SEQ ID NO: 111 - DNA, 122 bp, Homo sapiens
  misc_feature (61)..(62): /note="This region represents a CpG dinucleotide"
  misc_feature (61)..(61): /note="Nucleotide may be methylated to form 5-methylcytosine"
gggggcacccagggcaggctggtcttgagcctggagaaggctttgctcagcacgcgcatccgggcacgctcacgggcgttggccgcgttccgctgcgactgcttgcactctgcggctgagcc

SEQ ID NO: 112 - DNA, 122 bp, Homo sapiens
  misc_feature (61)..(62): /note="This region represents a CpG dinucleotide"
  misc_feature (61)..(61): /note="Nucleotide may be methylated to form 5-methylcytosine"
gccctccgggctcttagggcagaatatctagatgtcttctacagggctctctactggtcccgttaccatcttggccacattgggcccatccttctccatgcatgcttgctggtgatgctaga

SEQ ID NO: 113 - DNA, 122 bp, Homo sapiens
  misc_feature (61)..(62): /note="This region represents a CpG dinucleotide"
  misc_feature (61)..(61): /note="Nucleotide may be methylated to form 5-methylcytosine"
tcaagcgctctttccaacgcatcctatgcctcagctggatggacaacgccgcggaggagccggttgactattacgccaccgcgctcaagagccgtgcctacagtgtggaagacttccaacct

SEQ ID NO: 114 - DNA, 122 bp, Homo sapiens
  misc_feature (61)..(62): /note="This region represents a CpG dinucleotide"
  misc_feature (61)..(61): /note="Nucleotide may be methylated to form 5-methylcytosine"
gtgtgtgtgtgtgtgtgtgtgtgtgtgtgtgtgcgcgcgcgcgcgcgcgcgcttttgagccggagtttagctcttatcacccaggatggagtacaatggcacaatcttggctcacagcaacc

SEQ ID NO: 115 - DNA, 122 bp, Homo sapiens
  misc_feature (61)..(62): /note="This region represents a CpG dinucleotide"
  misc_feature (61)..(61): /note="Nucleotide may be methylated to form 5-methylcytosine"
attttactttttagcggagaggtgttttctctgagaatgccagccagtggcaacatggcccgctaaaaaggcctgtagtaaacttgaggaaagttttctgtttcctgtctgggtctgggaga

SEQ ID NO: 116 - DNA, 122 bp, Homo sapiens
  misc_feature (61)..(62): /note="This region represents a CpG dinucleotide"
  misc_feature (61)..(61): /note="Nucleotide may be methylated to form 5-methylcytosine"
aagaaccaaatgaaagttctgtgataacaaaggcctgatgcacaaaaaggccagcacccacgcctgttccctcagccagactgaaaaagctgcatgatacatagagcagtggatacactgca

SEQ ID NO: 117 - DNA, 122 bp, Homo sapiens
  misc_feature (61)..(62): /note="This region represents a CpG dinucleotide"
  misc_feature (61)..(61): /note="Nucleotide may be methylated to form 5-methylcytosine"
tctttctgtgattaaatgagacaaaacctgtccaacttaaaatcaattaaataccacatgcgtgagctttacataaaccttttaaaaagataaatatgttcattaaatgcaaggtggcaaat

SEQ ID NO: 118 - DNA, 122 bp, Homo sapiens
  misc_feature (61)..(62): /note="This region represents a CpG dinucleotide"
  misc_feature (61)..(61): /note="Nucleotide may be methylated to form 5-methylcytosine"
ttagtccggagtgcacagtaacatgcaaagaacattgcagtaaataaggagcatatggaccggtattcagcttctcagcacagcgcaagccccacacacacgatcctgggcatgtgctacta

SEQ ID NO: 119 - DNA, 122 bp, Homo sapiens
  misc_feature (61)..(62): /note="This region represents a CpG dinucleotide"
  misc_feature (61)..(61): /note="Nucleotide may be methylated to form 5-methylcytosine"
ctacacacactgttctgcaccttgatatttttacttagcatctgaagaatgtcctgtatccgtacattaagaactaccttattctttgttatgactacactacactcgattgcatgaataaa

SEQ ID NO: 120 - DNA, 122 bp, Homo sapiens
  misc_feature (61)..(62): /note="This region represents a CpG dinucleotide"
  misc_feature (61)..(61): /note="Nucleotide may be methylated to form 5-methylcytosine"
cgaatttctagctcctgcgtctccattgccggtcctaaaagtcgccgtttcactaagcttcggaacctgactccgagaaatctattcgttcgtcccaagatctcagccagaaagagaaatcc

SEQ ID NO: 121 - DNA, 122 bp, Homo sapiens
  misc_feature (61)..(62): /note="This region represents a CpG dinucleotide"
  misc_feature (61)..(61): /note="Nucleotide may be methylated to form 5-methylcytosine"
tttgatttaacagtgaaccttaattctttctggcttcacagtgaaacaagtttatgcaatcgatcaaatattttcatccctgaggttaacaattaccatcaaaatgttttgtggagactatg

SEQ ID NO: 122 - DNA, 122 bp, Homo sapiens
  misc_feature (61)..(62): /note="This region represents a CpG dinucleotide"
  misc_feature (61)..(61): /note="Nucleotide may be methylated to form 5-methylcytosine"
tagctgggattccaggtgcctgccaccacactcagataattgttgtatttttagtagagacgggattttgccaagttggccaagctggtctcgaactcatgaccttaggcgatccacccatc

SEQ ID NO: 123 - DNA, 122 bp, Homo sapiens
  misc_feature (61)..(62): /note="This region represents a CpG dinucleotide"
  misc_feature (61)..(61): /note="Nucleotide may be methylated to form 5-methylcytosine"
cttcatctgtttatataagaacgctgccaaagtaaccatctatgtgcccaggttttaagccgcatgacacaacctctttaccctgaggtgagagtgacatggtggccaatgagaggccatca

SEQ ID NO: 124 - DNA, 122 bp, Homo sapiens
  misc_feature (61)..(62): /note="This region represents a CpG dinucleotide"
  misc_feature (61)..(61): /note="Nucleotide may be methylated to form 5-methylcytosine"
gaagagatcgccgagtaccggcgccagctgcagtccaagagcatcgagctagagtcggtgcgcggcaccaaggagtccctggagcggcagctcagcgacatcgaggagcgccacaaccacga

SEQ ID NO: 125 - DNA, 122 bp, Homo sapiens
  misc_feature (61)..(62): /note="This region represents a CpG dinucleotide"
  misc_feature (61)..(61): /note="Nucleotide may be methylated to form 5-methylcytosine"
ctaagccagaaatgccaagccaagcgatcactgccacgccaagcagccaccgcaaagcctcgcgggtaaggccaagccacgcgggtaaggccaagccaatccgttacacaccagtgcgcctg

SEQ ID NO: 126 - DNA, 122 bp, Homo sapiens
  misc_feature (61)..(62): /note="This region represents a CpG dinucleotide"
  misc_feature (61)..(61): /note="Nucleotide may be methylated to form 5-methylcytosine"
gctccccgcctgcgggacgcacggagaccgcggtcagcgcgccgcctggccggcccagcgcgcccagcccgcgcccagccccgtccactcccgtccagccccgccgcccggccgcagtcccc

SEQ ID NO: 127 - DNA, 122 bp, Homo sapiens
  misc_feature (61)..(62): /note="This region represents a CpG dinucleotide"
  misc_feature (61)..(61): /note="Nucleotide may be methylated to form 5-methylcytosine"
gttttattctctgctgaataaccagcactcggtgctccataaatagttgttgaacgcgtgcgtgaatgagtgagtgaaaggctcctagtaccatgctaatctccactagtacctcccggccg

SEQ ID NO: 128 - DNA, 122 bp, Homo sapiens
  misc_feature (61)..(62): /note="This region represents a CpG dinucleotide"
  misc_feature (61)..(61): /note="Nucleotide may be methylated to form 5-methylcytosine"
aacatggtgaaagcccatttctgctaaaaatacaaaaaattagcagggcgtggtggcacacgcctgtagtcccagatactcaggacagtgaggcagaagaatcgcttgaacctgggaggcgg

SEQ ID NO: 129 - DNA, 122 bp, Homo sapiens
  misc_feature (61)..(62): /note="This region represents a CpG dinucleotide"
  misc_feature (61)..(61): /note="Nucleotide may be methylated to form 5-methylcytosine"
gaattgccacctccggctccaagggtgtttttccagtatctttaaaagccacagctgctgcgtggcttcctgaccgactggttccttggcgagagcaacagcagtgagtcaggagcaggagc

SEQ ID NO: 130 - DNA, 122 bp, Homo sapiens
  misc_feature (61)..(62): /note="This region represents a CpG dinucleotide"
  misc_feature (61)..(61): /note="Nucleotide may be methylated to form 5-methylcytosine"
gccggggcgtgatttccgatcctctgcctgcttgttgggtccctcggaggcgggtcagaccgcacccgccgcgggcgcccggtgcgcccccagcccctggctcgcggcggcgacagcggcgc

SEQ ID NO: 131 - DNA, 122 bp, Homo sapiens
  misc_feature (61)..(62): /note="This region represents a CpG dinucleotide"
  misc_feature (61)..(61): /note="Nucleotide may be methylated to form 5-methylcytosine"
cggtgcagccccgcgcttccagtagggtcatgcgaatgcagccctcaccgttctctcctgcgcatccgttctgcgcccagcctgcctctgagccctgagaagttttcactctaatgtcaccg

SEQ ID NO: 132 - DNA, 122 bp, Homo sapiens
  misc_feature (61)..(62): /note="This region represents a CpG dinucleotide"
  misc_feature (61)..(61): /note="Nucleotide may be methylated to form 5-methylcytosine"
caacgcgcagctggatgggatcatttcggacttcgaaggtgggtgctgggctggctgctgcggccgcggacgtgctggagaggaccctgcgggtgggcctggcgcgggacgggggtgcgctg

SEQ ID NO: 133 - DNA, 122 bp, Homo sapiens
  misc_feature (61)..(62): /note="This region represents a CpG dinucleotide"
  misc_feature (61)..(61): /note="Nucleotide may be methylated to form 5-methylcytosine"
aagtgggggaagctggctcagatgatgggccctaggggtgggctttgagtgagggactctcggggcgtggcttgagttgaagcactcctaggccctggggactatgggggcgtggcttggag

SEQ ID NO: 134 - DNA, 122 bp, Homo sapiens
  misc_feature (61)..(62): /note="This region represents a CpG dinucleotide"
  misc_feature (61)..(61): /note="Nucleotide may be methylated to form 5-methylcytosine"
cagtgataatctcaatagaagaatctaagagctagaagactcagttggaaacagcagaatcgggccaaataggaacagctccagtctactgctcccggcgtgagcgacacagaagacgaatg

SEQ ID NO: 135 - DNA, 122 bp, Homo sapiens
  misc_feature (61)..(62): /note="This region represents a CpG dinucleotide"
  misc_feature (61)..(61): /note="Nucleotide may be methylated to form 5-methylcytosine"
atcacccaagacggagctcccaccacatcctgatcacagcgttgcagagatcatgagacccggcctttgcaggcaagagttgcttgtcattcaaagcattttccctgaattccagacagcct

SEQ ID NO: 136 - DNA, 122 bp, Homo sapiens
  misc_feature (61)..(62): /note="This region represents a CpG dinucleotide"
  misc_feature (61)..(61): /note="Nucleotide may be methylated to form 5-methylcytosine"
cacccaccccagacctactcaatcacactccgtttcaacaagatctccaggtcatacgtacgtacagtacagtttgggaagcattgctctaggacagaaagagtttctcaaaattattagat

SEQ ID NO: 137 - DNA, 122 bp, Homo sapiens
  misc_feature (61)..(62): /note="This region represents a CpG dinucleotide"
  misc_feature (61)..(61): /note="Nucleotide may be methylated to form 5-methylcytosine"
caccggaacagctgcagccgcctggagagccagagggagccgggtggggcccgggggtggcgctggcatcgcggaacacccccgcccgcgttccaaacgaaagcacatcacccccaagcgac

SEQ ID NO: 138 - DNA, 122 bp, Homo sapiens
  misc_feature (61)..(62): /note="This region represents a CpG dinucleotide"
  misc_feature (61)..(61): /note="Nucleotide may be methylated to form 5-methylcytosine"
ctggtgcctccttccttagacgagctaaggtcaagacttctgctgctgcggaggagcccgcgcaccaggccggggtggactgcgcctgcgcatcgggcccgcctggttcttaggaactacga

SEQ ID NO: 139 - DNA, 122 bp, Homo sapiens
  misc_feature (61)..(62): /note="This region represents a CpG dinucleotide"
  misc_feature (61)..(61): /note="Nucleotide may be methylated to form 5-methylcytosine"
cagctttttgggctttgagattgtgagaccggggcatccccttgtccccaagagacccgacgcttgcttcatggcctacacgttcgagagagagtcttcgggagaggaggaggagtagggcc

SEQ ID NO: 140 - DNA, 122 bp, Homo sapiens
  misc_feature (61)..(62): /note="This region represents a CpG dinucleotide"
  misc_feature (61)..(61): /note="Nucleotide may be methylated to form 5-methylcytosine"
ctaaccttatcatcacctacaatcaacccttaatcaaaactctgagctttaactttggcacgatgattttgatggactttgtggattttatttttaaggaattgacttagtggacttaaccc

SEQ ID NO: 141 - DNA, 122 bp, Homo sapiens
  misc_feature (61)..(62): /note="This region represents a CpG dinucleotide"
  misc_feature (61)..(61): /note="Nucleotide may be methylated to form 5-methylcytosine"
caacatggtgaaatcccatctctaccaaaaataccaaaattagccgggagtggtggcgtgcgcttgtaatcgcacctactcgggaggctgaggcaggagaatcgcttgaaccgagtagacgc

SEQ ID NO: 142 - DNA, 122 bp, Homo sapiens
  misc_feature (61)..(62): /note="This region represents a CpG dinucleotide"
  misc_feature (61)..(61): /note="Nucleotide may be methylated to form 5-methylcytosine"
tttttgacagagaagaagagctgtcttgccacagacccggtatgtggagctgttcattgtcgtagacaaggaaagggtaagattggtgacaatttttcttcttttccatgaaaaggatatga

SEQ ID NO: 143 - DNA, 122 bp, Homo sapiens
  misc_feature (61)..(62): /note="This region represents a CpG dinucleotide"
  misc_feature (61)..(61): /note="Nucleotide may be methylated to form 5-methylcytosine"
cgtggccaggcaccccgggtcaccacctctcgacccagggcgagctcacgccgccgcctgcgcgctgaactgggagctgggagcagccgacatcggtctctgaaaccctgcgctgggaggcc

SEQ ID NO: 144 - DNA, 122 bp, Homo sapiens
  misc_feature (61)..(62): /note="This region represents a CpG dinucleotide"
  misc_feature (61)..(61): /note="Nucleotide may be methylated to form 5-methylcytosine"
ccattcattttatgatataccttttaaagacatcatcatcatcaaataatatttattacacgctgtaattcctagaagagcaggatttggactgaaaaacataactgagttacaagcaagac

SEQ ID NO: 145 - DNA, 122 bp, Homo sapiens
  misc_feature (61)..(62): /note="This region represents a CpG dinucleotide"
  misc_feature (61)..(61): /note="Nucleotide may be methylated to form 5-methylcytosine"
gaaaatggggaagtattaaaggaagagacgattaagcccctgagagtgtggctcctgggacgccagcgtttcagaagtagcataggctcctagatggacgctgacaaacccaagtagcgcct

SEQ ID NO: 146 - DNA, 122 bp, Homo sapiens
  misc_feature (61)..(62): /note="This region represents a CpG dinucleotide"
  misc_feature (61)..(61): /note="Nucleotide may be methylated to form 5-methylcytosine"
tagagacgggcgggcctcattctgtcaggttgtaggttaattccccaactcaaacttccccgatcaaacattgtcaggccaggcgactgttttggtttatggatgataaagtatagggccaa

SEQ ID NO: 147 - DNA, 122 bp, Homo sapiens
  misc_feature (61)..(62): /note="This region represents a CpG dinucleotide"
  misc_feature (61)..(61): /note="Nucleotide may be methylated to form 5-methylcytosine"
aaatggagccaagacctgtacacttcacacagcagccaagcctgtctatatatgttgacacgttttataggcagtacttttctgagctcttgatcaagatcagaataaaaatacaaataata

SEQ ID NO: 148 - DNA, 122 bp, Homo sapiens
  misc_feature (61)..(62): /note="This region represents a CpG dinucleotide"
  misc_feature (61)..(61): /note="Nucleotide may be methylated to form 5-methylcytosine"
gattctaatgaccatttccctgacgaagcaaccaggcttgagatagtatatggtgacactcgttaagtgattccctgtgagtgagggataaacctgtgaatggaataaggtccacgggcccc

SEQ ID NO: 149 - DNA, 122 bp, Homo sapiens
  misc_feature (61)..(62): /note="This region represents a CpG dinucleotide"
  misc_feature (61)..(61): /note="Nucleotide may be methylated to form 5-methylcytosine"
gcggacctcggcgtccttgcgtgctgctctcccgccagccggcgcagcttgggtacgcagcggcagtggctatttgtcctcaggagccgcagcgctgtgagccacgcagccccttcctgggc

SEQ ID NO: 150 - DNA, 122 bp, Homo sapiens
  misc_feature (61)..(62): /note="This region represents a CpG dinucleotide"
  misc_feature (61)..(61): /note="Nucleotide may be methylated to form 5-methylcytosine"
ttgtgtgcttatttgtcatctgtgcatcatctttggcaaaagttctgttcatatcctttgcgtatttcttaatttttaaaaaaatcgttcagtttcaagagttatttatatatttgacattt

SEQ ID NO: 151 - DNA, 122 bp, Homo sapiens
  misc_feature (61)..(62): /note="This region represents a CpG dinucleotide"
  misc_feature (61)..(61): /note="Nucleotide may be methylated to form 5-methylcytosine"
cttgctgcgtgtcctatgtccgttggctggagcaggacctcacaatcttaaactgatatccgatttgctaatagcctacaactttcctaaataggtaagtacagggaagagcaaagaagttg

SEQ ID NO: 152 - DNA, 122 bp, Homo sapiens
  misc_feature (61)..(62): /note="This region represents a CpG dinucleotide"
  misc_feature (61)..(61): /note="Nucleotide may be methylated to form 5-methylcytosine"
tctcactcataatttaaggtattttaattgaacaacttattcactcatcaaaccatctaccgaatacctactgtgtgccaggttctactgcatgctctcgggatatggcagtgaatacttgc

SEQ ID NO: 153 - DNA, 122 bp, Homo sapiens
  misc_feature (61)..(62): /note="This region represents a CpG dinucleotide"
  misc_feature (61)..(61): /note="Nucleotide may be methylated to form 5-methylcytosine"
gacgccgctcgcactagggggcgccagggccgctgcagagcccgagccagagccagggggcggggccgcgtctcgggagcgaggcctgagagcggcggggcggggcgtcggcgggcagtccc

SEQ ID NO: 154 - DNA, 122 bp, Homo sapiens
  misc_feature (61)..(62): /note="This region represents a CpG dinucleotide"
  misc_feature (61)..(61): /note="Nucleotide may be methylated to form 5-methylcytosine"
tcctcctcctcctccccgtctgtccgtccgtccgtccgtccgcccgcccgcccgcccgcccgcgcttccgtcctgtccagccgccagtcctccagcccgtgtccccgctccgcccgctttgt

SEQ ID NO: 155 - DNA, 122 bp, Homo sapiens
  misc_feature (61)..(62): /note="This region represents a CpG dinucleotide"
  misc_feature (61)..(61): /note="Nucleotide may be methylated to form 5-methylcytosine"
caacttcttgtgaatcttaaattatttcaaaataagttaaaaaaagcacatttccctttgcgtattattaagtatggatgtgtttctagaaattatgtgttactgattttactaattgaagg

SEQ ID NO: 156 - DNA, 122 bp, Homo sapiens
  misc_feature (61)..(62): /note="This region represents a CpG dinucleotide"
  misc_feature (61)..(61): /note="Nucleotide may be methylated to form 5-methylcytosine"
gcgctcctctctgctgcagatccaccgtagcgtgcacaccggcctgcgggccttcatctgcggccagtgcggcctggccttcaagtggtcgtcccactaccagtaccacttaaggcagcaca

SEQ ID NO: 157 - DNA, 122 bp, Homo sapiens
  misc_feature (61)..(62): /note="This region represents a CpG dinucleotide"
  misc_feature (61)..(61): /note="Nucleotide may be methylated to form 5-methylcytosine"
ccgccccagttccaggctctcctgcttctccacggactctgcgggaagttagagcctctgcgtgcgctccggggcccggcgagaggatgcgcaaggtggagagccgcggggaagggggcaga

SEQ ID NO: 158 - DNA, 122 bp, Homo sapiens
  misc_feature (61)..(62): /note="This region represents a CpG dinucleotide"
  misc_feature (61)..(61): /note="Nucleotide may be methylated to form 5-methylcytosine"
cagaggactctaagatgcaccgaacgccaccatgggcggttatggaagagaaaagctgcacgcacactacatgcacacacacatgcaagttcacaataaaatgcagggggatgtgtgtccac

SEQ ID NO: 159 - DNA, 122 bp, Homo sapiens
  misc_feature (61)..(62): /note="This region represents a CpG dinucleotide"
  misc_feature (61)..(61): /note="Nucleotide may be methylated to form 5-methylcytosine"
aaaaaaaaaaaaaaagtttaataattataatctgagggtaagaaatagtttaacagtggacgacatatcaaatttagtatgagaagagtgaaagttacttcaagttgtgaaatcatgattga

SEQ ID NO: 160 - DNA, 122 bp, Homo sapiens
  misc_feature (61)..(62): /note="This region represents a CpG dinucleotide"
  misc_feature (61)..(61): /note="Nucleotide may be methylated to form 5-methylcytosine"
gatttcaattgcacattttctttggatcatgaattgacattttgacaatattcccatgtacgtaattttaaacaacctctggatttatttacttatccaacagatactgactgagtgacatt

SEQ ID NO: 161 - DNA, 122 bp, Homo sapiens
  misc_feature (61)..(62): /note="This region represents a CpG dinucleotide"
  misc_feature (61)..(61): /note="Nucleotide may be methylated to form 5-methylcytosine"
ggagatacgctggtttaaagaaaagctgtttattcatttaccgggtttccttttggtcctcgctcacctttgatacctggatttccatgtgtaccctgaaggcaaagggaaaaaatattatt

SEQ ID NO: 162 - DNA, 122 bp, Homo sapiens
  misc_feature (61)..(62): /note="This region represents a CpG dinucleotide"
  misc_feature (61)..(61): /note="Nucleotide may be methylated to form 5-methylcytosine"
ttttttttttgagacggaggctcgctctgtcatctaggctgtagtgctgtgacatgatctcggctcactgcaacctccccctcccgggttcaagcgattctcctgcctcagccccctgagta

SEQ ID NO: 163 - DNA, 122 bp, Homo sapiens
  misc_feature (61)..(62): /note="This region represents a CpG dinucleotide"
  misc_feature (61)..(61): /note="Nucleotide may be methylated to form 5-methylcytosine"
catgaggctcagggtatacacttttggcagataccgcaggggagacactgtgtccttctccgtggctcgtatcagaagccgcatctgtttgtcctgttcctgcagctgctgactctgatggc

SEQ ID NO: 164 - DNA, 122 bp, Homo sapiens
  misc_feature (61)..(62): /note="This region represents a CpG dinucleotide"
  misc_feature (61)..(61): /note="Nucleotide may be methylated to form 5-methylcytosine"
ccctccaaccaaccttacaaaactccagcctccaaaactccgcccttcgcgattcttccccgcccctcggcgtccagacagatagacagacgacctgccccgccccctgcgccaccgactga

SEQ ID NO: 165 - DNA, 122 bp, Homo sapiens
  misc_feature (61)..(62): /note="This region represents a CpG dinucleotide"
  misc_feature (61)..(61): /note="Nucleotide may be methylated to form 5-methylcytosine"
agagtcggtgggactggctgcgctgccctgaagtggttctccaagcagcgcggagggtggcggacggcggacggagcccaggggccgcgtcgggtggggaaacccgaactcgcggaggggaa

SEQ ID NO: 166 - DNA, 122 bp, Homo sapiens
  misc_feature (61)..(62): /note="This region represents a CpG dinucleotide"
  misc_feature (61)..(61): /note="Nucleotide may be methylated to form 5-methylcytosine"
cgcgctccgcttctccgggttttagcggaagcctgcggggggcggggtaaccgcggaagccggcggccgtgggcgcgcgggttgggggctctcgcgccgctccgggctctccccccccccgg

SEQ ID NO: 167 - DNA, 122 bp, Homo sapiens
  misc_feature (61)..(62): /note="This region represents a CpG dinucleotide"
  misc_feature (61)..(61): /note="Nucleotide may be methylated to form 5-methylcytosine"
agtgtggctattttaaaccctgaggcaatgagaagttttcagatgcgtcctaaggcgctccggccagcgccctgcatgcacacgagggccttcctcagtgtggccccagcacatctgtagac

SEQ ID NO: 168 - DNA, 122 bp, Homo sapiens
  misc_feature (61)..(62): /note="This region represents a CpG dinucleotide"
  misc_feature (61)..(61): /note="Nucleotide may be methylated to form 5-methylcytosine"
ttgcatagaattttgagggcattgtaaaacaacaagtagatgcttattatctgccacacccgctctgaccagctctataacccgtcccattccattctgtgactgagaggcccagggtgtta

SEQ ID NO: 169 - DNA, 122 bp, Homo sapiens
  misc_feature (61)..(62): /note="This region represents a CpG dinucleotide"
  misc_feature (61)..(61): /note="Nucleotide may be methylated to form 5-methylcytosine"
cggcagccatcaggcgccagctccacagcctggctaaacagactccctccaccccacgtgcgcctcttcagccggttcccgttcactccaagacgtctgaacctgtcaccccacttcttcag

SEQ ID NO: 170 - DNA, 122 bp, Homo sapiens
  misc_feature (61)..(62): /note="This region represents a CpG dinucleotide"
  misc_feature (61)..(61): /note="Nucleotide may be methylated to form 5-methylcytosine"
gctacgtgccggggctgggccgggggtgaggcctggggcggcgcgcgaggggcggggacccggctacaggagcgcagtgctttggggcgtgtttgggggcgggggtctatggccgcgcagtc

SEQ ID NO: 171 - DNA, 122 bp, Homo sapiens
  misc_feature (61)..(62): /note="This region represents a CpG dinucleotide"
  misc_feature (61)..(61): /note="Nucleotide may be methylated to form 5-methylcytosine"
ggcttccgctcgcagtcgtggtcccgcggctcgcccagcaccgtgtcctcctcctataagcgcagcatgctcgccccgcgcctcgcttacagctcggccatgctcagctccgccgagagcag

SEQ ID NO: 172 - DNA, 122 bp, Homo sapiens
  misc_feature (61)..(62): /note="This region represents a CpG dinucleotide"
  misc_feature (61)..(61): /note="Nucleotide may be methylated to form 5-methylcytosine"
cttatagaaaaggtaaaggaaatcccaacatgcatgcactgccttagtgaccagggaattcgccccatggctatggggaaattagcctgaggcttagttttcattatcactgtctcccaggg

SEQ ID NO: 173 - DNA, 122 bp, Homo sapiens
  misc_feature (61)..(62): /note="This region represents a CpG dinucleotide"
  misc_feature (61)..(61): /note="Nucleotide may be methylated to form 5-methylcytosine"
ggattctagaggtgaacactttccatctgctttctcaggaagccctttggaagaaaaacacgatcaatgcaaatgtgaaaaccttataatgttccagaaccttgcaaacgaagaagtaagaa

SEQ ID NO: 174 - DNA, 122 bp, Homo sapiens
  misc_feature (61)..(62): /note="This region represents a CpG dinucleotide"
  misc_feature (61)..(61): /note="Nucleotide may be methylated to form 5-methylcytosine"
gcgtgctgggcttcgtagttctcaagtctgccttccctgtcttcccccagcatttcactgcgctttccgagatgcaggcctgcactgcacagccatgcatttccgttcagctggcgtctttc

SEQ ID NO: 175 - DNA, 122 bp, Homo sapiens
  misc_feature (61)..(62): /note="This region represents a CpG dinucleotide"
  misc_feature (61)..(61): /note="Nucleotide may be methylated to form 5-methylcytosine"
ccactggtgagggcgtggggagcagggggtggcagagggcacccgggcggtagtccgggacgcgcaaggcagagccctgacgctccgggtccccgtgcctggctcttcttgcctcgccaccg

SEQ ID NO: 176 - DNA, 122 bp, Homo sapiens
  misc_feature (61)..(62): /note="This region represents a CpG dinucleotide"
  misc_feature (61)..(61): /note="Nucleotide may be methylated to form 5-methylcytosine"
taagcttgggagatggagccttcaatgagcctagatcgagccacttcactccagccaaggcgcaagagtgagacactgtttcaaaacaacgacaacaacaacaacaacatcagcaacaaaaa

SEQ ID NO: 177 - DNA, 122 bp, Homo sapiens
  misc_feature (61)..(62): /note="This region represents a CpG dinucleotide"
  misc_feature (61)..(61): /note="Nucleotide may be methylated to form 5-methylcytosine"
aaaaaacagctgaatccaggacatttgcgtacagcactgttccatacggacagggcgcctcgcaagcttcccctggctccaggtgaagagaggaagttctggaattaggcagacttgagttc

SEQ ID NO: 178 - DNA, 122 bp, Homo sapiens
  misc_feature (61)..(62): /note="This region represents a CpG dinucleotide"
  misc_feature (61)..(61): /note="Nucleotide may be methylated to form 5-methylcytosine"
ctgattggatcctggatcctgccatatggtgtctgcttcttaattcagtccctgcttctccgtctaagcccttaggttccaccagtggctgcatacttggttcatctgggcatgctcaggta

SEQ ID NO: 179 - DNA, 122 bp, Homo sapiens
  misc_feature (61)..(62): /note="This region represents a CpG dinucleotide"
  misc_feature (61)..(61): /note="Nucleotide may be methylated to form 5-methylcytosine"
tgccagccttcttcaccgagagcagcgagtacagctgtgtgatggacggccagaccatggcggtggccactggagggggcaccagccctccccagcccaaccccttccgctccccctttcgc

SEQ ID NO: 180 - DNA, 122 bp, Homo sapiens
  misc_feature (61)..(62): /note="This region represents a CpG dinucleotide"
  misc_feature (61)..(61): /note="Nucleotide may be methylated to form 5-methylcytosine"
ttgtataaagaatgcttctatttctgagtatagcaagaaagatcctaacatacctcttagcgcctcccagcctcagacgtgtagcaagtgaaagctgtttgaattggcaaatgaggtaatta

SEQ ID NO: 181 - DNA, 122 bp, Homo sapiens
  misc_feature (61)..(62): /note="This region represents a CpG dinucleotide"
  misc_feature (61)..(61): /note="Nucleotide may be methylated to form 5-methylcytosine"
cctgctggaggaaagcagaaagggaactggggtataaccaagcttgtccaatccgaggcccgtgggtcacatgctgctgagggaggatgactttgaatgaggcccaacacaagttcgtaaag

SEQ ID NO: 182 - DNA, 122 bp, Homo sapiens
  misc_feature (61)..(62): /note="This region represents a CpG dinucleotide"
  misc_feature (61)..(61): /note="Nucleotide may be methylated to form 5-methylcytosine"
cgggtgggagccgcaatctccgcgcggtcgatggggccctccgctgcgcactcggccctgcgccgagcaccctgcagcctcctcccgcgacacggcgctttgaactcggcggattgattttg

SEQ ID NO: 183 - DNA, 122 bp, Homo sapiens
  misc_feature (61)..(62): /note="This region represents a CpG dinucleotide"
  misc_feature (61)..(61): /note="Nucleotide may be methylated to form 5-methylcytosine"
tgcgcatgcgagggatctaggttgcgtgctccttatgagaatccaatgctaaaagtaatgcgcttgaatcatcccgaaaccacccccccgacccctgtccgtggaaaaattgtctttcatga

SEQ ID NO: 184 - DNA, 122 bp, Homo sapiens
  misc_feature (61)..(62): /note="This region represents a CpG dinucleotide"
  misc_feature (61)..(61): /note="Nucleotide may be methylated to form 5-methylcytosine"
ttgttcactttctctggttcactccttcatctgctttgaaggaaacaagctgccatcttgcgagctgtcctatggagaggcccacatgtcaaggaatgggtgtttctggcaactaccaggta

SEQ ID NO: 185 - DNA, 122 bp, Homo sapiens
  misc_feature (61)..(62): /note="This region represents a CpG dinucleotide"
  misc_feature (61)..(61): /note="Nucleotide may be methylated to form 5-methylcytosine"
ggctgcggcgcctgcagtccagatcctcgcagttctgcgggcgaaggaggcgaacggaatcggcccccagtggggagcgcaacaagccacagtagccaaaccccgcgctcctgcccgggctc

SEQ ID NO: 186 - DNA, 122 bp, Homo sapiens
  misc_feature (61)..(62): /note="This region represents a CpG dinucleotide"
  misc_feature (61)..(61): /note="Nucleotide may be methylated to form 5-methylcytosine"
atggtgttcagtgtggtgtgactcctaacagcatagcagagaacccagcacgtaagtgcacgtgttcagtaaaggttgttcaagtgttgaaggacaacatctgaagaggtattttttggttg

SEQ ID NO: 187 - DNA, 122 bp, Homo sapiens
  misc_feature (61)..(62): /note="This region represents a CpG dinucleotide"
  misc_feature (61)..(61): /note="Nucleotide may be methylated to form 5-methylcytosine"
gcggacggcggctccatccgcggcaatcaccgtagtgcttgtttgtggaagccgagcgtgcgtgcgccgcgcgcgcacccagtccagcgcggagtgggcgtctacccgaggaggggtgtctg

SEQ ID NO: 188 - DNA, 122 bp, Homo sapiens
  misc_feature (61)..(62): /note="This region represents a CpG dinucleotide"
  misc_feature (61)..(61): /note="Nucleotide may be methylated to form 5-methylcytosine"
aaaagggcttccggcagaacagtccagattcactgggctgggtttgaaaagctatgtagacgttgtttttttctgagaagatggagaaggaaattcacatggagggagaagcattttgtccg

SEQ ID NO: 189 - DNA, 122 bp, Homo sapiens
  misc_feature (61)..(62): /note="This region represents a CpG dinucleotide"
  misc_feature (61)..(61): /note="Nucleotide may be methylated to form 5-methylcytosine"
ggggggctggcggggagggaggggggtggctgtgaggggagggtagagaggggttgagttcgtagactcccacacacttcgcgctcgggtccctgcctctcagcagcgccgccgcctcccag

SEQ ID NO: 190 - DNA, 122 bp, Homo sapiens
  misc_feature (61)..(62): /note="This region represents a CpG dinucleotide"
  misc_feature (61)..(61): /note="Nucleotide may be methylated to form 5-methylcytosine"
cccaagggtggagccctcatgacctaatcgtctcctgcaggtgccactttctaatactgtcgccttggtgattacgttttaatgtggattttggaagggacacaaacattcaaatcataatt

SEQ ID NO: 191 - DNA, 122 bp, Homo sapiens
  misc_feature (61)..(62): /note="This region represents a CpG dinucleotide"
  misc_feature (61)..(61): /note="Nucleotide may be methylated to form 5-methylcytosine"
ctgttgtgacgaataaatctgggttctcagcaaagtggacaggagaggcttgcaagaccacggcaataaaaggaccaggtaattcttgtgcacagaataagataggagacttcacaaaggcg

SEQ ID NO: 192 - DNA, 122 bp, Homo sapiens
  misc_feature (61)..(62): /note="This region represents a CpG dinucleotide"
  misc_feature (61)..(61): /note="Nucleotide may be methylated to form 5-methylcytosine"
cataatggctgtactaattcacattcctaccaacagggtgcattggttcccttttctctacgtacttctcaacactttttctggtctttatgataatgggcattctaacaggtgtgaggtgg

SEQ ID NO: 193 - DNA, 122 bp, Homo sapiens
  misc_feature (61)..(62): /note="This region represents a CpG dinucleotide"
  misc_feature (61)..(61): /note="Nucleotide may be methylated to form 5-methylcytosine"
gggtctctgacgcgcgactccctcggcggcaccccccacccatccccttcgcccctcctccgctccctctgtgctcccgaggcgcagtgcgctccggcctttgaccttctcaggctccgctg

SEQ ID NO: 194 - DNA, 122 bp, Homo sapiens
  misc_feature (61)..(62): /note="This region represents a CpG dinucleotide"
  misc_feature (61)..(61): /note="Nucleotide may be methylated to form 5-methylcytosine"
ggcgcggggaggagcagggatcttggcagcgggcgaggaggctgcgagcgagccgcgaaccgagcgggcggcgggcgcgcgcaccatgggggagaaacccgggaccaggtaagggaggtggg

SEQ ID NO: 195 - DNA, 122 bp, Homo sapiens
  misc_feature (61)..(62): /note="This region represents a CpG dinucleotide"
  misc_feature (61)..(61): /note="Nucleotide may be methylated to form 5-methylcytosine"
tgctactacagaatgaataccaactcagaaccacacacacaaagaacacagcttcttttacgcagtatcaaggcagccgccaggagtgacaaagaattccagagaagctaatcccttatgcc

SEQ ID NO: 196 - DNA, 122 bp, Homo sapiens
  misc_feature (61)..(62): /note="This region represents a CpG dinucleotide"
  misc_feature (61)..(61): /note="Nucleotide may be methylated to form 5-methylcytosine"
gggcgggaccggaggcgggggccgacggagcagcgttgggggcgcggcaggaggcggggccgagaaggaccctggagggcaagggggagctagaggcggggaccgggccgagggaggactcg

SEQ ID NO: 197 - DNA, 122 bp, Homo sapiens
  misc_feature (61)..(62): /note="This region represents a CpG dinucleotide"
  misc_feature (61)..(61): /note="Nucleotide may be methylated to form 5-methylcytosine"
cctcagtattagtcaagagttttccagagaacagaactaacaggatatctatctatatgacgagatttattccaagaattggctcacaggattgtggaggccaagaagtcccacagtctccc

SEQ ID NO: 198 - DNA, 122 bp, Homo sapiens
  misc_feature (61)..(62): /note="This region represents a CpG dinucleotide"
  misc_feature (61)..(61): /note="Nucleotide may be methylated to form 5-methylcytosine"
tttttagagatacagctaacaacagtctgactgtcatctaatggtcacctgaattcctggcgtgtgtgtgtgtgtgtgtgtgtgtgtgtgtgtgtgtgtgtctggtgtgctctcctactgtg

SEQ ID NO: 199 - DNA, 122 bp, Homo sapiens
  misc_feature (61)..(62): /note="This region represents a CpG dinucleotide"
  misc_feature (61)..(61): /note="Nucleotide may be methylated to form 5-methylcytosine"
attggtgggattctgttcctcatggacagagggttctgttcctctaggacaaagggcctccgtgtttcattggctgttccttaggttcttgccacctgggcctcatcatgggacaacttacc

SEQ ID NO: 200 - DNA, 122 bp, Homo sapiens
  misc_feature (61)..(62): /note="This region represents a CpG dinucleotide"
  misc_feature (61)..(61): /note="Nucleotide may be methylated to form 5-methylcytosine"
cgctctccttgcagcggcggggacggcggtgcgcggagccgggcatctcccgcgcccccccgcctctcccgcgcgccccccccgtggaagttacacacctttggattgcatttcgccgtcac

SEQ ID NO: 201 - DNA, 122 bp, Homo sapiens
  misc_feature (61)..(62): /note="This region represents a CpG dinucleotide"
  misc_feature (61)..(61): /note="Nucleotide may be methylated to form 5-methylcytosine"
ggaagggtggtttatgcctgggaaaaggcaggccgggtgccgggatgtagtgcgcctgcacgccgtctccagactacaactcccagaatgcgcggcgccccgagcgtatttccgcttccggt

SEQ ID NO: 202 - DNA, 122 bp, Homo sapiens
  misc_feature (61)..(62): /note="This region represents a CpG dinucleotide"
  misc_feature (61)..(61): /note="Nucleotide may be methylated to form 5-methylcytosine"
ctggtccaggtggaaacagaccgcggctaccctggtgatggaccccacggggcacacccgcgccaccccgcacccagggctcgcgccgcccgaggcccccggttcctgtccccctccccgcc

SEQ ID NO: 203 - DNA, 122 bp, Homo sapiens
  misc_feature (61)..(62): /note="This region represents a CpG dinucleotide"
  misc_feature (61)..(61): /note="Nucleotide may be methylated to form 5-methylcytosine"
tttcttggctgcagcttttatgacaccaacaaaacaaaaccccaaaccaacaacccaatccgaaccaaccaaataaagaagaaacccttggcttaggcgccaagctcggacagcgacgtctc

SEQ ID NO: 204 - DNA, 122 bp, Homo sapiens
  misc_feature (61)..(62): /note="This region represents a CpG dinucleotide"
  misc_feature (61)..(61): /note="Nucleotide may be methylated to form 5-methylcytosine"
agcgcacggccccgggcaggcagcgggcagcccatcccgggctcggcggccccggctctccggccctctccgcgagcccgcgctcctcccgctgtccccgggcccctccctggctgcaccgt

SEQ ID NO: 205 - DNA, 122 bp, Homo sapiens
  misc_feature (61)..(62): /note="This region represents a CpG dinucleotide"
  misc_feature (61)..(61): /note="Nucleotide may be methylated to form 5-methylcytosine"
cgcactcacctcggtcccaggtggactgaagtccagagcggcgctgtgcagctggaagggcgcgcgatagctcaagttagaggcggccccggggcgcggcgcaggacacaagacctcaaact

SEQ ID NO: 206 - DNA, 122 bp, Homo sapiens
  misc_feature (61)..(62): /note="This region represents a CpG dinucleotide"
  misc_feature (61)..(61): /note="Nucleotide may be methylated to form 5-methylcytosine"
ggctaacctgatttacattcccagtgacagtgaataggagttttctattgtctgcagcctcgccagcatttgttaacaaatatttatatatttcaggcaaagatcatctgttagtttttatt

SEQ ID NO: 207 - DNA, 122 bp, Homo sapiens
  misc_feature (61)..(62): /note="This region represents a CpG dinucleotide"
  misc_feature (61)..(61): /note="Nucleotide may be methylated to form 5-methylcytosine"
agtccagagcggcgctgtgcagctggaagggcgcgcgatagctcaagttagaggcggccccggggcgcggcgcaggacacaagacctcaaactggtacttgcacaggtagccgttggcgcgc

SEQ ID NO: 208 - DNA, 122 bp, Homo sapiens
  misc_feature (61)..(62): /note="This region represents a CpG dinucleotide"
  misc_feature (61)..(61): /note="Nucleotide may be methylated to form 5-methylcytosine"
tgaggaggaagggagagatgggactcagcgccgaggacggcgtctgggccgtgatcatctcgcaccagcagtgctgggccagcacctccccgggcaccgacctgccgctgagcgagatcccg

SEQ ID NO: 209 - DNA, 122 bp, Homo sapiens
  misc_feature (61)..(62): /note="This region represents a CpG dinucleotide"
  misc_feature (61)..(61): /note="Nucleotide may be methylated to form 5-methylcytosine"
gcaggcgcagtgcggggctgcgagggggcgtggtgcagcagggggcgtggcggggcggggcgtggcggctgagcccgggagaatgtgagttgttccctctctaattacctgtctgtccctcc

SEQ ID NO: 210 - DNA, 122 bp, Homo sapiens
  misc_feature (61)..(62): /note="This region represents a CpG dinucleotide"
  misc_feature (61)..(61): /note="Nucleotide may be methylated to form 5-methylcytosine"
ggatgccgtgggcggggcccaacggagcggacggaagcacggggcgcggggctggacccccggacaccccgtcccgcgcccccaccccctgtaggcgccgcgcagcacctacctgcgccctc

SEQ ID NO: 211 - DNA, 122 bp, Homo sapiens
  misc_feature (61)..(62): /note="This region represents a CpG dinucleotide"
  misc_feature (61)..(61): /note="Nucleotide may be methylated to form 5-methylcytosine"
gcgtctcccctcccgggcgggctgggtgcaggcggtgtcagctggcggcaagcggagcagcgaggcagggtagcttcatcacactcgcggcggatgcggattccgcgccgccccggctctag

SEQ ID NO: 212 - DNA, 122 bp, Homo sapiens
  misc_feature (61)..(62): /note="This region represents a CpG dinucleotide"
  misc_feature (61)..(61): /note="Nucleotide may be methylated to form 5-methylcytosine"
gtaggggctgtacggtgcaggttcctcccctggttcctcataggcagagtactatagggtcgcagtcttcctggacgttccctattggttgttgggcaggggctgtaggtattttctttagg

SEQ ID NO: 213 - DNA, 122 bp, Homo sapiens
  misc_feature (61)..(62): /note="This region represents a CpG dinucleotide"
  misc_feature (61)..(61): /note="Nucleotide may be methylated to form 5-methylcytosine"
cgtcgcgggtgttaaagggcgagtctacgcggatgtcacggtcgccgcgggcaaggaccgcgaggttgcggccctgctccgaatcccggctgcgctggccacgctcctccacgcgcggggcg

SEQ ID NO: 214 - DNA, 122 bp, Homo sapiens
  misc_feature (61)..(62): /note="This region represents a CpG dinucleotide"
  misc_feature (61)..(61): /note="Nucleotide may be methylated to form 5-methylcytosine"
gaagatctgttaaaagcacacgagtcgtctcagtccctcagtgggagctgtttcacctggcgtcatctagtcagccatcttcaataataactgttaaatggacatttatatccactgaaacc

SEQ ID NO: 215 - DNA, 122 bp, Homo sapiens
  misc_feature (61)..(62): /note="This region represents a CpG dinucleotide"
  misc_feature (61)..(61): /note="Nucleotide may be methylated to form 5-methylcytosine"
aggaaaaaggaggagaaacaaatggggttgggggatttttctttaaataaaatcttactgcgctctcctaacagatagttagaggtggacaccaagaagacagtactggaattggaggtgct

SEQ ID NO: 216 - DNA, 122 bp, Homo sapiens
  misc_feature (61)..(62): /note="This region represents a CpG dinucleotide"
  misc_feature (61)..(61): /note="Nucleotide may be methylated to form 5-methylcytosine"
ataggtggatgcagtggtgcatgcctgcctatactcccagctactcagtataggctgaggcgggaggatttcttgagtccagagttcaaggctgcagtgaactgtgattgcaccactgcact

SEQ ID NO: 217 - DNA, 122 bp, Homo sapiens
  misc_feature (61)..(62): /note="This region represents a CpG dinucleotide"
  misc_feature (61)..(61): /note="Nucleotide may be methylated to form 5-methylcytosine"
gccacacacacacacacacacacacacgccctaaatgtgtggctatatcattttaacaggcggtgaatgtggagaaatgactgaagaaaactttaaagagttcattttgcatcctgctacct

SEQ ID NO: 218 - DNA, 122 bp, Homo sapiens
  misc_feature (61)..(62): /note="This region represents a CpG dinucleotide"
  misc_feature (61)..(61): /note="Nucleotide may be methylated to form 5-methylcytosine"
gaagtcgcgcgtgcggggcttgttggcgcggcagacatagacgccggagtgccagggctgcgcgttggcaattagtaggttggtgcggcccaggacgatgacatctgtggagatgggcttcc

SEQ ID NO: 219 - DNA, 122 bp, Homo sapiens
  misc_feature (61)..(62): /note="This region represents a CpG dinucleotide"
  misc_feature (61)..(61): /note="Nucleotide may be methylated to form 5-methylcytosine"
cgaggaggcaaacacataaggcacgaggcgagaaacgtgcagagcggaggacgaggccgacggacggggaggctgggggggacactaggcagcctggccaactctgcttgtccccctgctct

SEQ ID NO: 220 - DNA, 122 bp, Homo sapiens
  misc_feature (61)..(62): /note="This region represents a CpG dinucleotide"
  misc_feature (61)..(61): /note="Nucleotide may be methylated to form 5-methylcytosine"
cgaggacatgttgacgtcgtccgagagtcttaaaatcctgctctggccggattccagactcgtgggggaaaggctggtatgttcgttttataacaggagttttagcgtcatcttttgtcctt

SEQ ID NO: 221 - DNA, 122 bp, Homo sapiens
  misc_feature (61)..(62): /note="This region represents a CpG dinucleotide"
  misc_feature (61)..(61): /note="Nucleotide may be methylated to form 5-methylcytosine"
ggtggccccacaggacagtctatagagcaggagacctgaggtggccgagggcggccgaaccggggagggagcgagttagggcacatggggacgcttttaggttgtctcctccttaatttttt

SEQ ID NO: 222 - DNA, 122 bp, Homo sapiens
  misc_feature (61)..(62): /note="This region represents a CpG dinucleotide"
  misc_feature (61)..(61): /note="Nucleotide may be methylated to form 5-methylcytosine"
caagttacctattatttcagaaagcatttaaataaaatgaaattaggttacgttctgcaacgcagatgtgtctcataaagaagagtgttaaatgacttttgtgaatggaaaatctgcatata

SEQ ID NO: 223 - DNA, 122 bp, Homo sapiens
  misc_feature (61)..(62): /note="This region represents a CpG dinucleotide"
  misc_feature (61)..(61): /note="Nucleotide may be methylated to form 5-methylcytosine"
cctcgatgggcggggagaagcgtgggctgcgcttgcgcactgagaggcggccgaaggggccgaggcggctacgcgtgcgcggtgggcggagcgcggctctcctaccttctcgggcagcccag

SEQ ID NO: 224 - DNA, 122 bp, Homo sapiens
  misc_feature (61)..(62): /note="This region represents a CpG dinucleotide"
  misc_feature (61)..(61): /note="Nucleotide may be methylated to form 5-methylcytosine"
taaatgttgaggactgcagcacttaaaattcagacctactatttagtttccttttgatagcgtaatgttcatttttgtttttgtgtggtatgatttcaggtagtagctgtttttttccttat

SEQ ID NO: 225 - DNA, 122 bp, Homo sapiens
  misc_feature (61)..(62): /note="This region represents a CpG dinucleotide"
  misc_feature (61)..(61): /note="Nucleotide may be methylated to form 5-methylcytosine"
tagagacacggtttcgccgtcttggacaggttggtctgtaactcctggcttcaggcgatccgcccgcccgcctcggcctcccaaagtgttgagattgcaggcgtgagccaccgtgagggcct

SEQ ID NO: 226 - DNA, 122 bp, Homo sapiens
  misc_feature (61)..(62): /note="This region represents a CpG dinucleotide"
  misc_feature (61)..(61): /note="Nucleotide may be methylated to form 5-methylcytosine"
ctgctcttataggcgagcgcggggcgggcctggctgggggcggtgccgcgcggccccgctcgcctataaggagctgtccgccacccgggtgctgattccagctctcgcgcccgacgaggtgg

SEQ ID NO: 227 - DNA, 122 bp, Homo sapiens
  misc_feature (61)..(62): /note="This region represents a CpG dinucleotide"
  misc_feature (61)..(61): /note="Nucleotide may be methylated to form 5-methylcytosine"
ggggtcccccagcactgcgggccgcccacgctgcgcttgaattcccggggggacctcagccgcctacccacgggggcagggcttgggacctgcagcccaccatgccccaaccctgccccaca

SEQ ID NO: 228 - DNA, 122 bp, Homo sapiens
  misc_feature (61)..(62): /note="This region represents a CpG dinucleotide"
  misc_feature (61)..(61): /note="Nucleotide may be methylated to form 5-methylcytosine"
ggggtcgccatgaccgagtggcccaggcccgagcgaagcccgcgcgcggtgagtccgccgcggcccatccgtccctccgcccgccagagcgtccatcgggacgcccacccgggagggtctcg

SEQ ID NO: 229 - DNA, 122 bp, Homo sapiens
  misc_feature (61)..(62): /note="This region represents a CpG dinucleotide"
  misc_feature (61)..(61): /note="Nucleotide may be methylated to form 5-methylcytosine"
tgcacgcacatgtgacaccggctctgacatgctgctgactggacgcttgtcccgatgggccgccagctgcggcctccaagaagctcctgggcgcccccgcccgacccgcacctagggagaac

SEQ ID NO: 230 - DNA, 122 bp, Homo sapiens
  misc_feature (61)..(62): /note="This region represents a CpG dinucleotide"
  misc_feature (61)..(61): /note="Nucleotide may be methylated to form 5-methylcytosine"
gcgggggaggttgcgggggaggctcggcgtccccgctctccgccccgcgacaccgactgccgccgtggccgccctcaaagctcatggttgtgccgccgccgccctcctgccggcccggctgg

SEQ ID NO: 231 - DNA, 122 bp, Homo sapiens
  misc_feature (61)..(62): /note="This region represents a CpG dinucleotide"
  misc_feature (61)..(61): /note="Nucleotide may be methylated to form 5-methylcytosine"
taagtggtttctgattgaacacagctgtctagctgctggccacggggtgcgcggaggaggcggggctagagggagaaaagggtgggggcgagtagcctggaggccgagcagaggagaccgtg

SEQ ID NO: 232 - DNA, 122 bp, Homo sapiens
  misc_feature (61)..(62): /note="This region represents a CpG dinucleotide"
  misc_feature (61)..(61): /note="Nucleotide may be methylated to form 5-methylcytosine"
ggtccctctcttcctcatctcactcttcatctttctatccaattcctctggtcactaaagcgttagcagcctgcctccttaaaggcacagagataaacactgcaattatatagagaggatac

SEQ ID NO: 233 - DNA, 122 bp, Homo sapiens
  misc_feature (61)..(62): /note="This region represents a CpG dinucleotide"
  misc_feature (61)..(61): /note="Nucleotide may be methylated to form 5-methylcytosine"
cctgctttcagatattaccgtttctttgatgtctccggggttgcctgaggccttattagtcgttggtctatggaaagcagttcaatgaatgttataatttgaattgattggaataattgagt

SEQ ID NO: 234 - DNA, 122 bp, Homo sapiens
  misc_feature (61)..(62): /note="This region represents a CpG dinucleotide"
  misc_feature (61)..(61): /note="Nucleotide may be methylated to form 5-methylcytosine"
cgcacacacacgcacacatatacacacatgcactcacatatatacacacgtgcacacacacgcaaacaagcgcctgaggataaacgtaatataagagggattaccaaagcctaggccaaatt

SEQ ID NO: 235 - DNA, 122 bp, Homo sapiens
  misc_feature (61)..(62): /note="This region represents a CpG dinucleotide"
  misc_feature (61)..(61): /note="Nucleotide may be methylated to form 5-methylcytosine"
agacactaccgagaaccagatgttcgccgcccgcgtggtcatcctgctgctgccgtttgccgtcatcctggcctcctacggtgccgtggcccgagctgtctgttgcatgcggttcagcggag

SEQ ID NO: 236 - DNA, 122 bp, Homo sapiens
  misc_feature (61)..(62): /note="This region represents a CpG dinucleotide"
  misc_feature (61)..(61): /note="Nucleotide may be methylated to form 5-methylcytosine"
ggggagcgctcgggcagccaccctgtccccgtctggagccccgcgctgcgtctaggagggcgcaacacgcagtccccgcgggggccagagctcggagccccctagtgcatgccccctctcct

SEQ ID NO: 237 - DNA, 122 bp, Homo sapiens
  misc_feature (61)..(62): /note="This region represents a CpG dinucleotide"
  misc_feature (61)..(61): /note="Nucleotide may be methylated to form 5-methylcytosine"
aatgctgaaaatagttagccatcaagaaaatgcacatcaaaaccacaatgaggccaggcacggtggctcgtgctaatcccagcactttgggaggccaaggcggaggttgcagtgagccaaga

SEQ ID NO: 238 - DNA, 122 bp, Homo sapiens
  misc_feature (61)..(62): /note="This region represents a CpG dinucleotide"
  misc_feature (61)..(61): /note="Nucleotide may be methylated to form 5-methylcytosine"
cccgcctcagcctcccaaagtgctgggattacagtcgtgagccaccacgcccagcctgcccggctaatttttaagattttttttgtagagatggagtcttggtatattgcccaaactggtct

SEQ ID NO: 239 - DNA, 122 bp, Homo sapiens
  misc_feature (61)..(62): /note="This region represents a CpG dinucleotide"
  misc_feature (61)..(61): /note="Nucleotide may be methylated to form 5-methylcytosine"
ttttaagacacagaaagaaaaatagcaagagtcacattcttaatttttccccttcttccccggctatagccaagcaggttggctgactcagtgagaagaaagccctgaatttattccttcta

SEQ ID NO: 240 - DNA, 122 bp, Homo sapiens
  misc_feature (61)..(62): /note="This region represents a CpG dinucleotide"
  misc_feature (61)..(61): /note="Nucleotide may be methylated to form 5-methylcytosine"
gatgaatgaaaatcaaaattatcataaatgtgtttacctccatctagactcctggagacccgtttactagaagtgcgctcaaagtgtggtgctggcctatctatgagggtgctggcctggcg

SEQ ID NO: 241 - DNA, 122 bp, Homo sapiens
  misc_feature (61)..(62): /note="This region represents a CpG dinucleotide"
  misc_feature (61)..(61): /note="Nucleotide may be methylated to form 5-methylcytosine"
tgtaataggttccttcttttattgctgatttagctgtagccagtaccctgatattgtcatcgttgaagatgacaatgaagatgagtatgcacctgtcattcagagtggagagcagaatgaac

SEQ ID NO: 242 - DNA, 122 bp, Homo sapiens
  misc_feature (61)..(62): /note="This region represents a CpG dinucleotide"
  misc_feature (61)..(61): /note="Nucleotide may be methylated to form 5-methylcytosine"
gcacttaacactacctggcacagattaagctcatctgaagtgggagctgttacttaggggcgtttgcctagaacacagggtccagaggctctctcccggaaacttagacccagtgagtcaga

SEQ ID NO: 243 - DNA, 122 bp, Homo sapiens
  misc_feature (61)..(62): /note="This region represents a CpG dinucleotide"
  misc_feature (61)..(61): /note="Nucleotide may be methylated to form 5-methylcytosine"
acagtttatccacttgtactgaaggacgtcttgcttgtttcctcataaagttgctataaacgtgtgtgggttttttgtgtggatagcagttttcaattcatttgggtaaatactaaggagta

SEQ ID NO: 244 - DNA, 122 bp, Homo sapiens
  misc_feature (61)..(62): /note="This region represents a CpG dinucleotide"
  misc_feature (61)..(61): /note="Nucleotide may be methylated to form 5-methylcytosine"
ccgagcgctgcccccgccggcccgcggctgccagccggccctgcccgcgcccgggccccgcgagcggccgcacttcaccttacggaggggagataatgagatcaattagaggcgccgtcacc

SEQ ID NO: 245 - DNA, 122 bp, Homo sapiens
  misc_feature (61)..(62): /note="This region represents a CpG dinucleotide"
  misc_feature (61)..(61): /note="Nucleotide may be methylated to form 5-methylcytosine"
agaccagcctgaccaacacggcgaaaccccatctctaccaaaaacacaaaattcacaggacgtggtgacacatgcctgtaatccaagctactcaggaggctgaggcaggagactcgcttgaa

SEQ ID NO: 246 - DNA, 122 bp, Homo sapiens
  misc_feature (61)..(62): /note="This region represents a CpG dinucleotide"
  misc_feature (61)..(61): /note="Nucleotide may be methylated to form 5-methylcytosine"
atttgtgaatgaagtagcctcccaagctagagtaggctcagagagacaccagtgcagccacgtgatgtaagaagatttatgaacagaaagagaacagggaagcacagaaaacggaagtgagg

SEQ ID NO: 247 - DNA, 122 bp, Homo sapiens
  misc_feature (61)..(62): /note="This region represents a CpG dinucleotide"
  misc_feature (61)..(61): /note="Nucleotide may be methylated to form 5-methylcytosine"
atttaattaattaattaatttttttgagacacagtcgtgctctgtcaccaggctgcagtgcggtggtgtgatcttggctcactgcaacctctgcctcctgggttcaagtgattctcctgcct

SEQ ID NO: 248 - DNA, 122 bp, Homo sapiens
  misc_feature (61)..(62): /note="This region represents a CpG dinucleotide"
  misc_feature (61)..(61): /note="Nucleotide may be methylated to form 5-methylcytosine"
aaaggccaatgaagcgctggaactggagagtctctcgcgtgtctgggagggtgttttgcgcggggcggggtggagcagagccggaagcgggaggggagcgtcaaacaggaaaagaagggaag

SEQ ID NO: 249 - DNA, 122 bp, Homo sapiens
  misc_feature (61)..(62): /note="This region represents a CpG dinucleotide"
  misc_feature (61)..(61): /note="Nucleotide may be methylated to form 5-methylcytosine"
ataccttctgtcatcagaaagtcacacgccccttagtggagaggtcaggttacctcttaacgacacaaaagacatctgtgatccggtgaaaccccgtctctactaaaaatacaaaaacttag

SEQ ID NO: 250 - DNA, 122 bp, Homo sapiens
  misc_feature (61)..(62): /note="This region represents a CpG dinucleotide"
  misc_feature (61)..(61): /note="Nucleotide may be methylated to form 5-methylcytosine"
gaaggaggctgcgcgccagcccgcccgcggcgcccgggctcaggcgccgtgacggctgcacgcgctgccccgcactctgagggccttcattagctcgctccccgcgccgaggctggggcggg

SEQ ID NO: 251 - DNA, 122 bp, Homo sapiens
  misc_feature (61)..(62): /note="This region represents a CpG dinucleotide"
  misc_feature (61)..(61): /note="Nucleotide may be methylated to form 5-methylcytosine"
gcctcccaggttcaagaaattctcttgcctcagccttctaagtagccaggcctacaggcgcgtgccaccacacccaactaatttttgtacttgtagtagagacagggtttcaccatgttggc

SEQ ID NO: 252 - DNA, 122 bp, Homo sapiens
  misc_feature (61)..(62): /note="This region represents a CpG dinucleotide"
  misc_feature (61)..(61): /note="Nucleotide may be methylated to form 5-methylcytosine"
ccagcggcagtagctgtagcagcttcagcgaagccggagatgggcagagagcgcgcgcggcgcagcagctccagattcactgctctcccctgcagctccccgcgcccccgccgctgtcgctg

SEQ ID NO: 253 - DNA, 122 bp, Homo sapiens
  misc_feature (61)..(62): /note="This region represents a CpG dinucleotide"
  misc_feature (61)..(61): /note="Nucleotide may be methylated to form 5-methylcytosine"
tgtgatctcagacgatgttgtattctgttttctagaaacccaacagggcactgggaagtccgttagccatcatatgcttagggttttggtttcattcttctgtgtatctttcttcttctctc

SEQ ID NO: 254 - DNA, 122 bp, Homo sapiens
  misc_feature (61)..(62): /note="This region represents a CpG dinucleotide"
  misc_feature (61)..(61): /note="Nucleotide may be methylated to form 5-methylcytosine"
aagtggagggagagcttcggacgattttcactggtatctcctcgtgggtattaagggagccgctcggaaactcataaacttgtctaaggcgatggaagtcgtccaggagcccgatgagtcaa

SEQ ID NO: 255 - DNA, 122 bp, Homo sapiens
  misc_feature (61)..(62): /note="This region represents a CpG dinucleotide"
  misc_feature (61)..(61): /note="Nucleotide may be methylated to form 5-methylcytosine"
cgggtaaggccaagccacgcgggtaaggccaagccaatccgttacacaccagtgcgcctgcgcacctttgacgtcactgaacctgtgccttcactgcatctgcagctccagcctcccagaaa

SEQ ID NO: 256 - DNA, 122 bp, Homo sapiens
  misc_feature (61)..(62): /note="This region represents a CpG dinucleotide"
  misc_feature (61)..(61): /note="Nucleotide may be methylated to form 5-methylcytosine"
tatcatttaacctgtacaagaccttacttggctgagctaggattcaaaactaggtcattccgaggagaatataaagtccagcttttttttttccacacagggatgtatatttccaggtacag

SEQ ID NO: 257 - DNA, 122 bp, Homo sapiens
  misc_feature (61)..(62): /note="This region represents a CpG dinucleotide"
  misc_feature (61)..(61): /note="Nucleotide may be methylated to form 5-methylcytosine"
aagagggagtcatccagttttgcctggtgcagttaggacagtgcttcgtcatacaggacacgctgagggtaacatgggtaaatggctagagtttcctgctttttgtttgtttattttagaga

SEQ ID NO: 258 - DNA, 122 bp, Homo sapiens
  misc_feature (61)..(62): /note="This region represents a CpG dinucleotide"
  misc_feature (61)..(61): /note="Nucleotide may be methylated to form 5-methylcytosine"
tgagcccaggagtttgagggtacagggagctacgatggcgccactgcactccaggctgggcgacagagccagaccctgtcacaaaaaagaaaggaaagaaagagagaaagaaagaaacaaac

SEQ ID NO: 259 - DNA, 122 bp, Homo sapiens
  misc_feature (61)..(62): /note="This region represents a CpG dinucleotide"
  misc_feature (61)..(61): /note="Nucleotide may be methylated to form 5-methylcytosine"
gacacctgtttcctagaatgcttctcttgctccctctttctgttcaagtcagtaaactcacgttgtataataaagaatttgactggactttgactctggttcctgggaggtaccctcaatcc

SEQ ID NO: 260 - DNA, 122 bp, Homo sapiens
  misc_feature (61)..(62): /note="This region represents a CpG dinucleotide"
  misc_feature (61)..(61): /note="Nucleotide may be methylated to form 5-methylcytosine"
tgattcaatactagtatacaaattccatctttaaattttgtcagttattccagtaataaccgttatatgtttcattttatttcctaatgcaggatcatctaaattcaactattaccatataa

SEQ ID NO: 261 - DNA, 122 bp, Homo sapiens
  misc_feature (61)..(62): /note="This region represents a CpG dinucleotide"
  misc_feature (61)..(61): /note="Nucleotide may be methylated to form 5-methylcytosine"
atttttagtttaagagcttttacaaaaataggtcatgagccagaggcccatgtactgcaacgtgctggtcagtggttttattattaatatctaattatttgaaattattaattgctaaaacc

SEQ ID NO: 262 - DNA, 122 bp, Homo sapiens
  misc_feature (61)..(62): /note="This region represents a CpG dinucleotide"
  misc_feature (61)..(61): /note="Nucleotide may be methylated to form 5-methylcytosine"
tttttttgtatggaaaacacattctaggaccggattaagaaatgttactctagggccaggcgcagtggctcatgcctgtaataccagcattttgggaggttgaggcaggcagatcacgtgag

SEQ ID NO: 263 - DNA, 122 bp, Homo sapiens
  misc_feature (61)..(62): /note="This region represents a CpG dinucleotide"
  misc_feature (61)..(61): /note="Nucleotide may be methylated to form 5-methylcytosine"
cactcacctcggtcccaggtggactgaagtccagagcggcgctgtgcagctggaagggcgcgcgatagctcaagttagaggcggccccggggcgcggcgcaggacacaagacctcaaactgg

SEQ ID NO: 264 - DNA, 122 bp, Homo sapiens
  misc_feature (61)..(62): /note="This region represents a CpG dinucleotide"
  misc_feature (61)..(61): /note="Nucleotide may be methylated to form 5-methylcytosine"
caatcctcctacctctcagccttccgagtagctgggactaaaggcatgcaccaccatgcccggctaatttttgtatttgtagggacagggttttgttatgtttcccaggctagtctcaaact

SEQ ID NO: 265 - DNA, 122 bp, Homo sapiens
  misc_feature (61)..(62): /note="This region represents a CpG dinucleotide"
  misc_feature (61)..(61): /note="Nucleotide may be methylated to form 5-methylcytosine"
cctccacccccggggggttcctgcgcactgaaagaccgttctccggcaggttttgggatccggcgacggctgaccgcgcgccgcccccacgcccggttccacgatgctgcaatacagaaagt

SEQ ID NO: 266 - DNA, 122 bp, Homo sapiens
  misc_feature (61)..(62): /note="This region represents a CpG dinucleotide"
  misc_feature (61)..(61): /note="Nucleotide may be methylated to form 5-methylcytosine"
tgcccccgccggcccgcggctgccagccggccctgcccgcgcccgggccccgcgagcggccgcacttcaccttacggaggggagataatgagatcaattagaggcgccgtcaccgcgccgga

SEQ ID NO: 267 - DNA, 122 bp, Homo sapiens
  misc_feature (61)..(62): /note="This region represents a CpG dinucleotide"
  misc_feature (61)..(61): /note="Nucleotide may be methylated to form 5-methylcytosine"
atcttggctcactgcagcctctgcttcctgggttcaagctattctcatgcttcagcgtctcgagtagctgggattataggtgtgcaccaccacacccggctaatttttgtatttttagtaga

SEQ ID NO: 268 - DNA, 122 bp, Homo sapiens
  misc_feature (61)..(62): /note="This region represents a CpG dinucleotide"
  misc_feature (61)..(61): /note="Nucleotide may be methylated to form 5-methylcytosine"
tggcccccggccgggcgcctgcatcgggactggtgggaggcggcgcgcgggggtggaggccggcgccggcgcgagcggcgcggaagggcgcgaaggaacgcgcggagctcgcagcagcctcc

SEQ ID NO: 269 - DNA, 122 bp, Homo sapiens
  misc_feature (61)..(62): /note="This region represents a CpG dinucleotide"
  misc_feature (61)..(61): /note="Nucleotide may be methylated to form 5-methylcytosine"
cgcaaccggttccgccgcgtttgtgggctggtagcccggaatacatttcccagaggccttcgcggccgacgtgcttcgcgcaggaacgcagccgcctcccgactggaggacgcggtagcgga

SEQ ID NO: 270 - DNA, 122 bp, Homo sapiens
  misc_feature (61)..(62): /note="This region represents a CpG dinucleotide"
  misc_feature (61)..(61): /note="Nucleotide may be methylated to form 5-methylcytosine"
cggtgatgggaaggggagctgcgaggcgaagtgttcttcagggaagcgggctcgagtctccgcagctgcggcggcggcggcggcgcgctgggccggcggcgggcgcgggcagggggccgggg

SEQ ID NO: 271 - DNA, 122 bp, Homo sapiens
  misc_feature (61)..(62): /note="This region represents a CpG dinucleotide"
  misc_feature (61)..(61): /note="Nucleotide may be methylated to form 5-methylcytosine"
agattccaacctctccaggctgtgccacttactagctgtgtggctacagttatgtggctgcgtgagcctcaagttcctcatgtataaaacggaggtaaaaacagtcactgcctctggggttg

SEQ ID NO: 272 - DNA, 122 bp, Homo sapiens
  misc_feature (61)..(62): /note="This region represents a CpG dinucleotide"
  misc_feature (61)..(61): /note="Nucleotide may be methylated to form 5-methylcytosine"
ggctgcggacggcggctccatccgcggcaatcaccgtagtgcttgtttgtggaagccgagcgtgcgtgcgccgcgcgcgcacccagtccagcgcggagtgggcgtctacccgaggaggggtg

SEQ ID NO: 273 - DNA, 122 bp, Homo sapiens
  misc_feature (61)..(62): /note="This region represents a CpG dinucleotide"
  misc_feature (61)..(61): /note="Nucleotide may be methylated to form 5-methylcytosine"
gcacgggagcgctcagcgtctagtctgcgggcccttcccggttccctccctctctcctcccgccgcccgccccctgccgaggccatccgcctcacagtagcaaggttgtctctcgtctactc

SEQ ID NO: 274 - DNA, 122 bp, Homo sapiens
  misc_feature (61)..(62): /note="This region represents a CpG dinucleotide"
  misc_feature (61)..(61): /note="Nucleotide may be methylated to form 5-methylcytosine"
agccagtgaaaataaatcttcactaagttttatggaattatacacatgccacaaaacacacgtttcttgacctcttatactgtgacaaaacattagtgctattaccccacttttcatatgct

SEQ ID NO: 275 - DNA, 122 bp, Homo sapiens
  misc_feature (61)..(62): /note="This region represents a CpG dinucleotide"
  misc_feature (61)..(61): /note="Nucleotide may be methylated to form 5-methylcytosine"
aactggaggcatcacatttcctgattttcaaaatacattacaaggctatagtaatttaaacgatatagtactggcataaagacagacatatggacaaatggaacagaatagagagcctagaa

SEQ ID NO: 276 - DNA, 122 bp, Homo sapiens
  misc_feature (61)..(62): /note="This region represents a CpG dinucleotide"
  misc_feature (61)..(61): /note="Nucleotide may be methylated to form 5-methylcytosine"
ctaaaaagttattgaatacatttgtttctttaattgtgaaagtccagtctttttgacatgcgtacattttctacagtagcaaccacagtgcacacacacagtcttccagcctgctctgctcg

SEQ ID NO: 277 - DNA, 122 bp, Homo sapiens
  misc_feature (61)..(62): /note="This region represents a CpG dinucleotide"
  misc_feature (61)..(61): /note="Nucleotide may be methylated to form 5-methylcytosine"
agtggtagatttcttcttccgaaatgttttaaagccaggaaaattcagactaaggagccccgtgtactcagtgtgaggtcctctactggtggggagggtcttgctgtgccaccaccaccaag

SEQ ID NO: 278 - DNA, 122 bp, Homo sapiens
  misc_feature (61)..(62): /note="This region represents a CpG dinucleotide"
  misc_feature (61)..(61): /note="Nucleotide may be methylated to form 5-methylcytosine"
agaacacaagaatcgaaaaagcctgtgagatactggtgctcgtgatcgtaagctccaggtcggggggttttcagatgaacacaaaaagggggctgctcccgtcccaagatgagtgataaatg

SEQ ID NO: 279 - DNA, 122 bp, Homo sapiens
  misc_feature (61)..(62): /note="This region represents a CpG dinucleotide"
  misc_feature (61)..(61): /note="Nucleotide may be methylated to form 5-methylcytosine"
ggctgggctggttttcatcagcaatggaaggggcccatttgcatgtctcctactatatagcgagttctggaagggatgcctcagagtgggctgtgtcccagagtggatatgagcgattatat

SEQ ID NO: 280 - DNA, 122 bp, Homo sapiens
  misc_feature (61)..(62): /note="This region represents a CpG dinucleotide"
  misc_feature (61)..(61): /note="Nucleotide may be methylated to form 5-methylcytosine"
tgttctggttagttcttattctgcaaatttagactgttcttgaaccctcagcctcttactcgtaaaacacacatcactgatcccaaggggtaccaggtgaagatgagtctggaccgggaaaa

SEQ ID NO: 281 - DNA, 122 bp, Homo sapiens
  misc_feature (61)..(62): /note="This region represents a CpG dinucleotide"
  misc_feature (61)..(61): /note="Nucleotide may be methylated to form 5-methylcytosine"
gggaacaacacacagcagggctagttgtgggtgggggcaaggggagggagagcattaggacgaatagctaatgcatgctgggcttaaaacctagaggacaggctgataggtgcagcaaacca

SEQ ID NO: 282 - DNA, 122 bp, Homo sapiens
  misc_feature (61)..(62): /note="This region represents a CpG dinucleotide"
  misc_feature (61)..(61): /note="Nucleotide may be methylated to form 5-methylcytosine"
attgtcttatctccttaccattttgcttctaagggtcacactgtactctttgttttcttgcgttacattgattaattaattctattaatagttttataaccattaatttttatttttttgct

SEQ ID NO: 283 - DNA, 122 bp, Homo sapiens
  misc_feature (61)..(62): /note="This region represents a CpG dinucleotide"
  misc_feature (61)..(61): /note="Nucleotide may be methylated to form 5-methylcytosine"
gcgagggatctctgtgcgtcctcactggcccatgcacccagcacctgcgactcccgccgtcgggctgcgtggccccgcgcccacacctgcccgtcccttccgtcgtccctcgctcgcgcaga

SEQ ID NO: 284 - DNA, 122 bp, Homo sapiens
  misc_feature (61)..(62): /note="This region represents a CpG dinucleotide"
  misc_feature (61)..(61): /note="Nucleotide may be methylated to form 5-methylcytosine"
aaaggccgtactctgccccccgcgggacccaggtccccgcctgctgcagagcgcactctgcgcacgtcgagccgcgaaaggttcacagaagaaaacaagagaaagaagtagcaggcactgag

SEQ ID NO: 285 - DNA, 122 bp, Homo sapiens
  misc_feature (61)..(62): /note="This region represents a CpG dinucleotide"
  misc_feature (61)..(61): /note="Nucleotide may be methylated to form 5-methylcytosine"
gcacggcgggggcggggcgctcatcccaggcggcttctgattggcctcggccgcctcgtgcgtcacagccccgcccctgcccgggagtcccgcagcggtgacttgtcaccgacgcccggcgt

SEQ ID NO: 286 - DNA, 122 bp, Homo sapiens
  misc_feature (61)..(62): /note="This region represents a CpG dinucleotide"
  misc_feature (61)..(61): /note="Nucleotide may be methylated to form 5-methylcytosine"
agtgacataattttttttttttttgaggtggaatctcactccgtcgcccaagctggagtgcgatgacgcgatatcggctcaccgcaacctcgcctcccgagttcaagcgattctcctgtctc

SEQ ID NO: 287 - DNA, 122 bp, Homo sapiens
  misc_feature (61)..(62): /note="This region represents a CpG dinucleotide"
  misc_feature (61)..(61): /note="Nucleotide may be methylated to form 5-methylcytosine"
tatttttagtagagactgggtttcaccatgttagttaggctggtctcgaatccctgagttcgtgatccacaccccttagcctcccaaagtgctgggattacaggcgtgagccaccgcgcccg

SEQ ID NO: 288 - DNA, 122 bp, Homo sapiens
  misc_feature (61)..(62): /note="This region represents a CpG dinucleotide"
  misc_feature (61)..(61): /note="Nucleotide may be methylated to form 5-methylcytosine"
tttctgcaatcctaaaaccattaacttatacccaaaactaatcttaaacatagtgttgaacgtttgtatttgttgaagaaacaattctacaatggtgaagtctccagtgttatcacagctaa

SEQ ID NO: 289 - DNA, 122 bp, Homo sapiens
  misc_feature (61)..(62): /note="This region represents a CpG dinucleotide"
  misc_feature (61)..(61): /note="Nucleotide may be methylated to form 5-methylcytosine"
ggaccccgggcatcctgtcccgttcctgcgcgacgcctgcggccccggcctcagcctcggcgccctctctgggcagctgcacgccgcagcctcgtgtctccccagattgcacgggagccccg

SEQ ID NO: 290 - DNA, 122 bp, Homo sapiens
  misc_feature (61)..(62): /note="This region represents a CpG dinucleotide"
  misc_feature (61)..(61): /note="Nucleotide may be methylated to form 5-methylcytosine"
aaaacacagtgacacccctgtctctacaaaaaataaaaattatccgggtgcagtaacacacgcctgaagtcctggctactcaggaggataaggtaggaggatttcttgagcccagaagtcca

SEQ ID NO: 291 - DNA, 122 bp, Homo sapiens
  misc_feature (61)..(62): /note="This region represents a CpG dinucleotide"
  misc_feature (61)..(61): /note="Nucleotide may be methylated to form 5-methylcytosine"
agggtgtaggccaagtaaatgactttgtaactttacttcatccttttcatttacatagggcgtgtcccaagtagagggtatttaaactcccaaaaattctgtaacaggggcccttgagctcc

SEQ ID NO: 292 - DNA, 122 bp, Homo sapiens
  misc_feature (61)..(62): /note="This region represents a CpG dinucleotide"
  misc_feature (61)..(61): /note="Nucleotide may be methylated to form 5-methylcytosine"
ggcccctcacccctaaagtgctcgagactcaactgggcttcccgggcagcggcgagggggcggggatgtggcggccggaggtcaccggggcgtcactgcgcccgccctggccctcccccggc

SEQ ID NO: 293 - DNA, 122 bp, Homo sapiens
  misc_feature (61)..(62): /note="This region represents a CpG dinucleotide"
  misc_feature (61)..(61): /note="Nucleotide may be methylated to form 5-methylcytosine"
aaggttttaaacagagacaggttttctaaaattcatctttgataactccagctctgcactcgcaacccataagtgaggctcaagtggaaattgacaacactctctgtctaatcacctcgttt

SEQ ID NO: 294 - DNA, 122 bp, Homo sapiens
  misc_feature (61)..(62): /note="This region represents a CpG dinucleotide"
  misc_feature (61)..(61): /note="Nucleotide may be methylated to form 5-methylcytosine"
ttttccatctaaccccggcatcatttaaacgggctaaataaatctgtactacctgccctacgtacctccgagggaaaaagtgagtttatgttgaaaccaaagatctattaagtcccccaaaa

SEQ ID NO: 295 - DNA, 122 bp, Homo sapiens
  misc_feature (61)..(62): /note="This region represents a CpG dinucleotide"
  misc_feature (61)..(61): /note="Nucleotide may be methylated to form 5-methylcytosine"
taccccccccttcgcagttcagatgcaacaaccgactggcattaatgctgcagcagagatcgttaagactgaaggaacagattccttgcggcagtaagataccaagctacaaagaagacctg

SEQ ID NO: 296 - DNA, 122 bp, Homo sapiens
  misc_feature (61)..(62): /note="This region represents a CpG dinucleotide"
  misc_feature (61)..(61): /note="Nucleotide may be methylated to form 5-methylcytosine"
gtcccatacaggcttattcgattctgcatccttatttaaacactaagctattctttgtgtcgtagttgaaaccagtgattgaaattaataaattcattgtaaatacatagaaaactgaagat

SEQ ID NO: 297 - DNA, 122 bp, Homo sapiens
  misc_feature (61)..(62): /note="This region represents a CpG dinucleotide"
  misc_feature (61)..(61): /note="Nucleotide may be methylated to form 5-methylcytosine"
caaaaagaacttaacccttttgctaccagaaaagtctccattttcacaattttataaccacgcatctaacatgaaacagtgatgcatgggacatacaaattctaggggaaataaaaggcagt

SEQ ID NO: 298 - DNA, 122 bp, Homo sapiens
  misc_feature (61)..(62): /note="This region represents a CpG dinucleotide"
  misc_feature (61)..(61): /note="Nucleotide may be methylated to form 5-methylcytosine"
ccccctgttcaaggtctgtcaccgtagggggcgggggggcgcgtggagccgctgggggttcggcccaccccgcgaaccgagctcccggccctgtgcgccctcagctctgccgcgggcgttgg

SEQ ID NO: 299 - DNA, 122 bp, Homo sapiens
  misc_feature (61)..(62): /note="This region represents a CpG dinucleotide"
  misc_feature (61)..(61): /note="Nucleotide may be methylated to form 5-methylcytosine"
accccgcgtccccgccgccaccccccaccccccagtccccacctctccgcctcccccgcccgccgccttcccgccaagccaggggagacagtgagccccggcttgtaaagaaaagtaaaatg

SEQ ID NO: 300 - DNA, 122 bp, Homo sapiens
  misc_feature (61)..(62): /note="This region represents a CpG dinucleotide"
  misc_feature (61)..(61): /note="Nucleotide may be methylated to form 5-methylcytosine"
cgaagggcgggcacctgcgggtggggcggggcctgaattagcgggagcgcccgggaggggcggggccggggcctgcgtgagcgggtcggggagggggcggagcctgcggggggcggggcctg

SEQ ID NO: 301 - DNA, 122 bp, Homo sapiens
  misc_feature (61)..(62): /note="This region represents a CpG dinucleotide"
  misc_feature (61)..(61): /note="Nucleotide may be methylated to form 5-methylcytosine"
ctcgaattcctgacctgttgatccacctgcctcggcctcccaaagcgccgggattacaggcgtgagccgctgcgcctagcctgtctgtagtctgtgtaatactatgactttggttttctcag

SEQ ID NO: 302 - DNA, 122 bp, Homo sapiens
  misc_feature (61)..(62): /note="This region represents a CpG dinucleotide"
  misc_feature (61)..(61): /note="Nucleotide may be methylated to form 5-methylcytosine"
tttaaatttatcctttaatacacagatgcatgcacacacacatgcacactcacatactgacgcatgaatacatatgtacagagccttgaaatttaggtaaaaagtacttaaattggccttct

SEQ ID NO: 303 - DNA, 122 bp, Homo sapiens
  misc_feature (61)..(62): /note="This region represents a CpG dinucleotide"
  misc_feature (61)..(61): /note="Nucleotide may be methylated to form 5-methylcytosine"
tacctggtgacgcacaagcagagcctggaggacatgctggagaagcacgcgacgctggcgcgcgagggccgcctgtgcaagcgcgaggtgcagctgcgcctgtcctacgtgtacgactggtc

SEQ ID NO: 304 - DNA, 122 bp, Homo sapiens
  misc_feature (61)..(62): /note="This region represents a CpG dinucleotide"
  misc_feature (61)..(61): /note="Nucleotide may be methylated to form 5-methylcytosine"
gaaactacgcgcagttgttgaatagactttgcgctaggcaaagacaggttaatcgagggccgcatcgcgaaaacaagcgagtgttgtatgtttgcactgaatccaaatgtctgcattttcct

SEQ ID NO: 305 - DNA, 122 bp, Homo sapiens
  misc_feature (61)..(62): /note="This region represents a CpG dinucleotide"
  misc_feature (61)..(61): /note="Nucleotide may be methylated to form 5-methylcytosine"
tacaaatgctgaggaactcttccatattaaaggaaattaaaaagatatggtaactaaatacggtatgtgatcctgtactagatctatactggaaggaaaaaatgttaaataaagacattact

SEQ ID NO: 306 - DNA, 122 bp, Homo sapiens
  misc_feature (61)..(62): /note="This region represents a CpG dinucleotide"
  misc_feature (61)..(61): /note="Nucleotide may be methylated to form 5-methylcytosine"
gctactagatggttggattagtcttttgcccctatacccagatcagatgaccgatttgcacgtcaggaccactacagacccccaccagagtttcctctcgcttcgccctgcccaggcatagt

SEQ ID NO: 307 - DNA, 122 bp, Homo sapiens
  misc_feature (61)..(62): /note="This region represents a CpG dinucleotide"
  misc_feature (61)..(61): /note="Nucleotide may be methylated to form 5-methylcytosine"
gatgccttccctcttcactgttgaacttcattatagattaacttccttttacctttctcacgcaaagatttcatgcctatcgcattgctttaagaagaaatgttaactatactattttaaat

SEQ ID NO: 308 - DNA, 122 bp, Homo sapiens
  misc_feature (61)..(62): /note="This region represents a CpG dinucleotide"
  misc_feature (61)..(61): /note="Nucleotide may be methylated to form 5-methylcytosine"
aggaggaaagccctgagaaaatctgtttatgaaaataaatgtaacctactataacaagttcgtataaataaaaatggaataaaatgatgtatttcctgatgtgaatgacaatagaaaaagca

SEQ ID NO: 309 - DNA, 122 bp, Homo sapiens
  misc_feature (61)..(62): /note="This region represents a CpG dinucleotide"
  misc_feature (61)..(61): /note="Nucleotide may be methylated to form 5-methylcytosine"
ctaacttgaactccactaaagcaaatatggaaaaacaccccgggccactcccagcacccacgcaaagaaaacagaaacagagaggaagcaagaatggaaataaccagcagtctccattgctt

SEQ ID NO: 310 - DNA, 122 bp, Homo sapiens
  misc_feature (61)..(62): /note="This region represents a CpG dinucleotide"
  misc_feature (61)..(61): /note="Nucleotide may be methylated to form 5-methylcytosine"
tcctccaggtgttgcagaactccgcggtcggggccgggatcacgggggagacgcaggatgcggtccctcgccggtggcccctgccagcccccgggtccccttctcctccatcagccggtagt

SEQ ID NO: 311 - DNA, 122 bp, Homo sapiens
  misc_feature (61)..(62): /note="This region represents a CpG dinucleotide"
  misc_feature (61)..(61): /note="Nucleotide may be methylated to form 5-methylcytosine"
tcccttccttgaatgactgaatcacaatactttgatggtgcattcatttgttcgtttgttcgtttgttcattcattcattcattcattcgagacaggatcttgatctgttgcccaggctggg

SEQ ID NO: 312 - DNA, 122 bp, Homo sapiens
  misc_feature (61)..(62): /note="This region represents a CpG dinucleotide"
  misc_feature (61)..(61): /note="Nucleotide may be methylated to form 5-methylcytosine"
attgtaacattcaaacttgacttataacaaaagaaacaagattgcaaacaaaaatgtttacggggtttccaaacataaataaatgaaatagtgtttaggcagtagggctcatgctgatggct

SEQ ID NO: 313 - DNA, 122 bp, Homo sapiens
  misc_feature (61)..(62): /note="This region represents a CpG dinucleotide"
  misc_feature (61)..(61): /note="Nucleotide may be methylated to form 5-methylcytosine"
agtgatcctctcgcctcagcctcccgagtagctgagaccacaggtgcctgccaccacgcccggctaattttctcaaagtttttgcagagacgagcgtctcactgtgttgcccaagctggtct

SEQ ID NO: 314 - DNA, 122 bp, Homo sapiens
  misc_feature (61)..(62): /note="This region represents a CpG dinucleotide"
  misc_feature (61)..(61): /note="Nucleotide may be methylated to form 5-methylcytosine"
gatgaggaagtcctctctgctttaacctttacaaggaaaataactttgaaacaaccaattcgctttttgttctgtgtttctgctttcttcagcccttttctgtctataaagccagcctcctc

SEQ ID NO: 315 - DNA, 122 bp, Homo sapiens
  misc_feature (61)..(62): /note="This region represents a CpG dinucleotide"
  misc_feature (61)..(61): /note="Nucleotide may be methylated to form 5-methylcytosine"
ttggatggtggagactgagagtgtacctccacatggtcaacagagtcaagctcccaaggacgtaaaacaagatgagaaggaaatctcgtccagtttttgtttcagggacgtgcagcaaagtt

SEQ ID NO: 316 - DNA, 122 bp, Homo sapiens
  misc_feature (61)..(62): /note="This region represents a CpG dinucleotide"
  misc_feature (61)..(61): /note="Nucleotide may be methylated to form 5-methylcytosine"
tggctcccacaccggtccctccataactcgcgctcctccctcgctccgggctcggggagccgctcgctcccagcgcccagagtcagccggttccaccttcggctgcgagagccgccgccccg

SEQ ID NO: 317 - DNA, 122 bp, Homo sapiens
  misc_feature (61)..(62): /note="This region represents a CpG dinucleotide"
  misc_feature (61)..(61): /note="Nucleotide may be methylated to form 5-methylcytosine"
gcgccatgcccactgatgctcagtctgtcttctgcagtttagtcatcatttatcaaacgccgagtataatcttctagataatataccaggcaaagactgtttaaaaggcaaagttacataat

SEQ ID NO: 318 - DNA, 122 bp, Homo sapiens
  misc_feature (61)..(62): /note="This region represents a CpG dinucleotide"
  misc_feature (61)..(61): /note="Nucleotide may be methylated to form 5-methylcytosine"
aggcacggttcagccgtaccacaaacccacatggtcaggaagtgactcacgtattaatgccgtttgagtttgtgtgctgtggggaaggtcttttgacaatattgtgtatactggcttttcca

SEQ ID NO: 319 - DNA, 122 bp, Homo sapiens
  misc_feature (61)..(62): /note="This region represents a CpG dinucleotide"
  misc_feature (61)..(61): /note="Nucleotide may be methylated to form 5-methylcytosine"
ccgggcccgggagggggcgggccgggccggggttccagagcccatcgggagtcctgaggtcgccgtaggggagggaaggggaaggctagaggccacgcggggcggggactgggggggctggg

SEQ ID NO: 320 - DNA, 122 bp, Homo sapiens
  misc_feature (61)..(62): /note="This region represents a CpG dinucleotide"
  misc_feature (61)..(61): /note="Nucleotide may be methylated to form 5-methylcytosine"
ctggccaagtgccggcccatcgcggtgcgcagcggagacgccttccacgagatccggccgcgcgccgaggtggccaacctcagcgcgcacagcgccagccccatccaggatgcggtcctgaa

SEQ ID NO: 321 - DNA, 122 bp, Homo sapiens
  misc_feature (61)..(62): /note="This region represents a CpG dinucleotide"
  misc_feature (61)..(61): /note="Nucleotide may be methylated to form 5-methylcytosine"
acccgaacgcgcgctccaggccctcgaacaaggcctctggctgccagagcgagtgaggggcgcagaggcggcagagagcggagagccccggtgtctccgcgagggcggcggcggccagcaga

SEQ ID NO: 322 - DNA, 122 bp, Homo sapiens
  misc_feature (61)..(62): /note="This region represents a CpG dinucleotide"
  misc_feature (61)..(61): /note="Nucleotide may be methylated to form 5-methylcytosine"
cttaagagtgtatgtgtattgcttgaaccccaaaagctaggcagtgaaccaaggccactgcgcccagccaaggaccacgtgtccctgagaacctaaacatcctggggcatagctggggacat

SEQ ID NO: 323 - DNA, 122 bp, Homo sapiens
  misc_feature (61)..(62): /note="This region represents a CpG dinucleotide"
  misc_feature (61)..(61): /note="Nucleotide may be methylated to form 5-methylcytosine"
cgctcgggctggagcgcctgaagccgcgaccgccgcctcagccgcctcagccgcggtcgccgccgcttcggctgacttaggctccgccgccgcctcctcacccgcctcgccccgaccccgcc

SEQ ID NO: 324 - DNA, 122 bp, Homo sapiens
  misc_feature (61)..(62): /note="This region represents a CpG dinucleotide"
  misc_feature (61)..(61): /note="Nucleotide may be methylated to form 5-methylcytosine"
ggaatcaaaggaatcctgatttctgacttgacagggtagaaggaggtgtgtgtgtgtgtgcgtgtgtgtgtgtatgtttatgtagggacagtgacacccaagagaggctaggaataggtttg

SEQ ID NO: 325 - DNA, 122 bp, Homo sapiens
  misc_feature (61)..(62): /note="This region represents a CpG dinucleotide"
  misc_feature (61)..(61): /note="Nucleotide may be methylated to form 5-methylcytosine"
tgcgcatcgctggctctgggttccgccgaatgcgtcctcctggcggtgatggctctggaccgcgcggccgcagtgtgccgcccgctgcgctatgcggggctcgtctccccgcgcctatgtcg

SEQ ID NO: 326 - DNA, 122 bp, Homo sapiens
  misc_feature (61)..(62): /note="This region represents a CpG dinucleotide"
  misc_feature (61)..(61): /note="Nucleotide may be methylated to form 5-methylcytosine"
gcggcgcggtaggggaaaggagcccggctccactcacgcgcccgggggcggcactggggccgccgctgcgtctctccggctcaaaaaactgaaaaggggaaaggaaaaaaaaaaaaaaaaga

SEQ ID NO: 327 - DNA, 122 bp, Homo sapiens
  misc_feature (61)..(62): /note="This region represents a CpG dinucleotide"
  misc_feature (61)..(61): /note="Nucleotide may be methylated to form 5-methylcytosine"
actgttactgtaagatgaacattaaaaagtcacgtctggccagtacggggatcgaacccgcgaccttagcgttattagcaccacgctctaaccaactgagctaaccggccccgcttactaaa

SEQ ID NO: 328 - DNA, 122 bp, Homo sapiens
  misc_feature (61)..(62): /note="This region represents a CpG dinucleotide"
  misc_feature (61)..(61): /note="Nucleotide may be methylated to form 5-methylcytosine"
cgaggcaggtggatctcttgagcccagggactggagactagcctgggcaacacatcgagacgttgtctctaccaaaaacaaatttttttttttttttttgagacaaagtctcgctcttgtcg

SEQ ID NO: 329 - DNA, 122 bp, Homo sapiens
  misc_feature (61)..(62): /note="This region represents a CpG dinucleotide"
  misc_feature (61)..(61): /note="Nucleotide may be methylated to form 5-methylcytosine"
tcttaatttttttaagagacagctgtaacattgtttacaaacgtataaataccatcccagcgagaaactagctttgtgcttctgtcataaaagagacacaggtttctaacaggaaatggaaa

SEQ ID NO: 330 - DNA, 122 bp, Homo sapiens
  misc_feature (61)..(62): /note="This region represents a CpG dinucleotide"
  misc_feature (61)..(61): /note="Nucleotide may be methylated to form 5-methylcytosine"
acagagtgctgattggtccattttacaaacctctagctacctacagagtgctgataggtgcgtttttacagagcactgattggtgcattttacaaaactctagctagctacagagtgctgat

SEQ ID NO: 331 - DNA, 122 bp, Homo sapiens
  misc_feature (61)..(62): /note="This region represents a CpG dinucleotide"
  misc_feature (61)..(61): /note="Nucleotide may be methylated to form 5-methylcytosine"
ttcaagcgattctcctgcctcagcctccggagtagctgggactacaggcgtgagccaccgcgcccggccatattatgtattatgtataaacgcatatgaccttacacacaaggttaaatgca

SEQ ID NO: 332 - DNA, 122 bp, Homo sapiens
  misc_feature (61)..(62): /note="This region represents a CpG dinucleotide"
  misc_feature (61)..(61): /note="Nucleotide may be methylated to form 5-methylcytosine"
cattttctctccccctcccccacccccccacccccagtaggacttgtgtgtcggcagaggcgtctgacgaggggctaatttcgctttccttgtttacgatcgagaaaagcgcttggctctcc

SEQ ID NO: 333 - DNA, 122 bp, Homo sapiens
  misc_feature (61)..(62): /note="This region represents a CpG dinucleotide"
  misc_feature (61)..(61): /note="Nucleotide may be methylated to form 5-methylcytosine"
agagtggattggtgggattgatggaggcgtctatcttcatgtccaagacactttctcatgcgccctcaagtggtttggaacaggagtcacacactcaaatgcctgcagggattgggctgtta

SEQ ID NO: 334 - DNA, 122 bp, Homo sapiens
  misc_feature (61)..(62): /note="This region represents a CpG dinucleotide"
  misc_feature (61)..(61): /note="Nucleotide may be methylated to form 5-methylcytosine"
gcattgggtagctgggtgacctcttatgtacccttggaggccagggccaagagaccatcccgtcatggggtgaagaggggccttggcagagaggttgcagaggaggctcctgggggaggact

SEQ ID NO: 335 - DNA, 122 bp, Homo sapiens
  misc_feature (61)..(62): /note="This region represents a CpG dinucleotide"
  misc_feature (61)..(61): /note="Nucleotide may be methylated to form 5-methylcytosine"
cacgcccatgtactacttcctctgccacctggccttggtagacgcgggcttcactactagcgtggtgccgccgctgctggccaacctgcgcggaccagcgctctggctgccgcgcagccact

SEQ ID NO: 336 - DNA, 122 bp, Homo sapiens
  misc_feature (61)..(62): /note="This region represents a CpG dinucleotide"
  misc_feature (61)..(61): /note="Nucleotide may be methylated to form 5-methylcytosine"
gggacgcgggcctggcggggctactggtgggcacgatgggcgtctcgctgctgtccaacgcgctggtgctgctctgcctgctgcacagcgcggacatccgccgccaggcgccggcgctcttc

SEQ ID NO: 337 - DNA, 122 bp, Homo sapiens
  misc_feature (61)..(62): /note="This region represents a CpG dinucleotide"
  misc_feature (61)..(61): /note="Nucleotide may be methylated to form 5-methylcytosine"
ggaccgcagcgcggcccagccccgggcacccgcctcggacgctcgggcgccaggaggcttcgctggaggggctgggccaaggagattaagaagaaaacgactttctgcaggaggaagagccc

SEQ ID NO: 338 - DNA, 122 bp, Homo sapiens
  misc_feature (61)..(62): /note="This region represents a CpG dinucleotide"
  misc_feature (61)..(61): /note="Nucleotide may be methylated to form 5-methylcytosine"
gaggagcgcgccgctgcctctggcgggctttcggcttgaggggcaaggtgaagagcgcaccggccgtggggtttaccgagctggatttgtatgttgcaccatgccttcttggatcggggctg

SEQ ID NO: 339 - DNA, 122 bp, Homo sapiens
  misc_feature (61)..(62): /note="This region represents a CpG dinucleotide"
  misc_feature (61)..(61): /note="Nucleotide may be methylated to form 5-methylcytosine"
aaatacagacagtatacactgttgacaaggctaaggaaagaagtcttctcactcacttctcgggggatggagttttctgcttgaaaattaggtgaaatgtatcaactccccctccccacaaa

SEQ ID NO: 340 - DNA, 122 bp, Homo sapiens
  misc_feature (61)..(62): /note="This region represents a CpG dinucleotide"
  misc_feature (61)..(61): /note="Nucleotide may be methylated to form 5-methylcytosine"
tcctgctcggctgccttgtgataactaaactcattccctatttcaacaccaccgtctcagcgttttggctttatctgtgtagcaggcaagaagaacccactggagtgtaacattttcattta

SEQ ID NO: 341 - DNA, 122 bp, Homo sapiens
  misc_feature (61)..(62): /note="This region represents a CpG dinucleotide"
  misc_feature (61)..(61): /note="Nucleotide may be methylated to form 5-methylcytosine"
tccgaaccagcgcagcgcggggcggggcagcgggaaggtagtcggaggcgcagggcggagcggagcggggcggggcccgcgagccgaggtgggggcggggcacgcgcgaggggcgctggcga

SEQ ID NO: 342 - DNA, 122 bp, Homo sapiens
  misc_feature (61)..(62): /note="This region represents a CpG dinucleotide"
  misc_feature (61)..(61): /note="Nucleotide may be methylated to form 5-methylcytosine"
atattttatgtactttgtgcctttcatgaacagaatattccaagcattctctgcaaaatacgcatgaaaacaattgggagagaagaggtcaattatctttgagaagcccaattacagaatga

SEQ ID NO: 343 - DNA, 122 bp, Homo sapiens
  misc_feature (61)..(62): /note="This region represents a CpG dinucleotide"
  misc_feature (61)..(61): /note="Nucleotide may be methylated to form 5-methylcytosine"
aaaatttgttgtggacctttcctgtatgttgtaccacgtggaggtttattggtcttcacccgttaggtaccaatagcctctagttgtgacaacccaaaacgtttccagaattgcctgaatca

SEQ ID NO: 344 - DNA, 122 bp, Homo sapiens
  misc_feature (61)..(62): /note="This region represents a CpG dinucleotide"
  misc_feature (61)..(61): /note="Nucleotide may be methylated to form 5-methylcytosine"
ctccacgctagtacctcgcctgattttccatcgttgcggtatccagccgcttcagacgtccgccgccttcagtggtggtagtcaaatgtagtcaaccaaaccacagcatcccttaggttaaa

SEQ ID NO: 345 - DNA, 122 bp, Homo sapiens
  misc_feature (61)..(62): /note="This region represents a CpG dinucleotide"
  misc_feature (61)..(61): /note="Nucleotide may be methylated to form 5-methylcytosine"
tgagccccgagggagcgggggacgaggactcgtgctcctcctcggccccgctgtccccgtcgtcctcgccccggtccatggcctcgggctccggctgccctcctggcaagtgtgtgtgcaac

SEQ ID NO: 346 - DNA, 122 bp, Homo sapiens
  misc_feature (61)..(62): /note="This region represents a CpG dinucleotide"
  misc_feature (61)..(61): /note="Nucleotide may be methylated to form 5-methylcytosine"
cgccgcagtgtgcttccagcgcatgcgctgctaacgccccttaaccccccctccgcgccccgcctcccccacgcgccgctctccagcctctaggagtctaacccttagcggtccaccgacct

SEQ ID NO: 347 - DNA, 122 bp, Homo sapiens
  misc_feature (61)..(62): /note="This region represents a CpG dinucleotide"
  misc_feature (61)..(61): /note="Nucleotide may be methylated to form 5-methylcytosine"
tcttcccagtcgccccgccccctgcccctctgtcctaggcgcaagtctccgggcttgggacgctcgccgccagcgcccgcccgcctgccccgcccctagccccccgccccccgccccccgcc

SEQ ID NO: 348 - DNA, 122 bp, Homo sapiens
  misc_feature (61)..(62): /note="This region represents a CpG dinucleotide"
  misc_feature (61)..(61): /note="Nucleotide may be methylated to form 5-methylcytosine"
gcgacggagacactaccgagaaccagatgttcgccgcccgcgtggtcatcctgctgctgccgtttgccgtcatcctggcctcctacggtgccgtggcccgagctgtctgttgcatgcggttc

SEQ ID NO: 349 - DNA, 122 bp, Homo sapiens
  misc_feature (61)..(62): /note="This region represents a CpG dinucleotide"
  misc_feature (61)..(61): /note="Nucleotide may be methylated to form 5-methylcytosine"
tctggccccatcctccagctcccgccgtgttgctcagagcagctcacggtgggcacgcggcgactctgaggaatgggcgttcccacagctccccggcttccgtgacggccacgaccggctct

SEQ ID NO: 350 - DNA, 122 bp, Homo sapiens
  misc_feature (61)..(62): /note="This region represents a CpG dinucleotide"
  misc_feature (61)..(61): /note="Nucleotide may be methylated to form 5-methylcytosine"
gattattaattgcggtaagtcgcattgcgccattccactcctccctcggcagctcgtttacgacccaaaaggggacacaaatgcccctgagagagcagccgtagactgggatagatgaggat

SEQ ID NO: 351 - DNA, 122 bp, Homo sapiens
  misc_feature (61)..(62): /note="This region represents a CpG dinucleotide"
  misc_feature (61)..(61): /note="Nucleotide may be methylated to form 5-methylcytosine"
accaatgagctgccaactcgcgcgtctccggcgtgactgccgagattgacgtggaggacacgtcaaattgattcccgcacgctgcagcctcccggtcagacgaatttctcccaatcggatga

SEQ ID NO: 352 - DNA, 122 bp, Homo sapiens
  misc_feature (61)..(62): /note="This region represents a CpG dinucleotide"
  misc_feature (61)..(61): /note="Nucleotide may be methylated to form 5-methylcytosine"
ctattgagtcacatgaccaaagcactaccacacggctgatatgacagcttagaacagctgcggaccccaggtctgctctgggcttcagtcagtcgctagtaaactgttccatgtggtattcc

SEQ ID NO: 353 - DNA, 122 bp, Homo sapiens
  misc_feature (61)..(62): /note="This region represents a CpG dinucleotide"
  misc_feature (61)..(61): /note="Nucleotide may be methylated to form 5-methylcytosine"
ccggggagcggatccgagagggccgagtcctcgaaagaggccttgaggcgacgggagacccgggatcgaagtcagctgccggagggagagccccccatgccggctcgagagctcgggtttcg

SEQ ID NO: 354 - DNA, 122 bp, Homo sapiens
  misc_feature (61)..(62): /note="This region represents a CpG dinucleotide"
  misc_feature (61)..(61): /note="Nucleotide may be methylated to form 5-methylcytosine"
agtggagaggtcaggttacctcttaacgacacaaaagacatctgtgatccggtgaaaccccgtctctactaaaaatacaaaaacttagccgggtgtggtggcgggcgcctgtagctgcttgg

SEQ ID NO: 355 - DNA, 122 bp, Homo sapiens
  misc_feature (61)..(62): /note="This region represents a CpG dinucleotide"
  misc_feature (61)..(61): /note="Nucleotide may be methylated to form 5-methylcytosine"
ggcgggatctgcggccgcccggggccctcggccaacatcccagcatcctctgcgccgcgccggccccggactccatttcccagcggcccctgcggcctgccctagggctgcggcgcctttgt

SEQ ID NO: 356 - DNA, 122 bp, Homo sapiens
  misc_feature (61)..(62): /note="This region represents a CpG dinucleotide"
  misc_feature (61)..(61): /note="Nucleotide may be methylated to form 5-methylcytosine"
gatctaattagaaccaaaggtcccacctccaaataccatcatgttggagatcagggcttccgtatatgaatttggggaaaatgtgaacattcagtccatggcaccttccgtaggaagtcttg

SEQ ID NO: 357 - DNA, 122 bp, Homo sapiens
  misc_feature (61)..(62): /note="This region represents a CpG dinucleotide"
  misc_feature (61)..(61): /note="Nucleotide may be methylated to form 5-methylcytosine"
tggctaagtgacttctggtcggggcagctctacagaatccatgcaagagaggtttaggggcggcagtctcaggggcaggaagcttgggggcttcactcaaagctggacatgctaagtgcacc

SEQ ID NO: 358 - DNA, 122 bp, Homo sapiens
  misc_feature (61)..(62): /note="This region represents a CpG dinucleotide"
  misc_feature (61)..(61): /note="Nucleotide may be methylated to form 5-methylcytosine"
agtgtgctgtgatcatgccactgttctccagtctggacaacagagcaagaacttgtctctcggggaaaaggaaaagaaaaagaaaaaaaaaaagaatagtaatataaatctaggccagatgt

SEQ ID NO: 359 - DNA, 122 bp, Homo sapiens
  misc_feature (61)..(62): /note="This region represents a CpG dinucleotide"
  misc_feature (61)..(61): /note="Nucleotide may be methylated to form 5-methylcytosine"
cccagcgcagccagtaagtggcgctgggcctcgggtttggcggcccggaggagcgggctgcggattacctgcagcagcggggagccgccgagctcctccccgcccgcccccacaccccaccc

SEQ ID NO: 360 - DNA, 122 bp, Homo sapiens
  misc_feature (61)..(62): /note="This region represents a CpG dinucleotide"
  misc_feature (61)..(61): /note="Nucleotide may be methylated to form 5-methylcytosine"
tccagccatctgtctttgctgccctgcacccagactgtggagcactgctgggggaggactcgtgcttccaggattccttgttgatgccggctcattctgcatagccctcctacactgcatcc

SEQ ID NO: 361 - DNA, 122 bp, Homo sapiens
  misc_feature (61)..(62): /note="This region represents a CpG dinucleotide"
  misc_feature (61)..(61): /note="Nucleotide may be methylated to form 5-methylcytosine"
gtacacctacctgttgtcctatctgctttggagactgaagcaggaagattgcttgagccccgaagttcgtgaccagcctgggcaacgtagcaagagcacgcctcaaaatatatttatatgtt

SEQ ID NO: 362 - DNA, 122 bp, Homo sapiens
  misc_feature (61)..(62): /note="This region represents a CpG dinucleotide"
  misc_feature (61)..(61): /note="Nucleotide may be methylated to form 5-methylcytosine"
tgcagacccagggaccaccaaacactccatcactgcagacccagggaccaccgaggactccgtcactgcagacccagggaccacagaagatgaaaccactaaacatggtgacactcaccttc

SEQ ID NO: 363 - DNA, 122 bp, Homo sapiens
  misc_feature (61)..(62): /note="This region represents a CpG dinucleotide"
  misc_feature (61)..(61): /note="Nucleotide may be methylated to form 5-methylcytosine"
cggtgggcgggaacggaggaaacagacccgagaggccgcgagaggacggaactcacttcccgccgccgtagcgtcctcgtcagctcgccctccgactctccgcatgggcgcgcagagttccc

SEQ ID NO: 364 - DNA, 122 bp, Homo sapiens
  misc_feature (61)..(62): /note="This region represents a CpG dinucleotide"
  misc_feature (61)..(61): /note="Nucleotide may be methylated to form 5-methylcytosine"
cgcccgaccctacccatattaggagaacagctctccagacgtgtctccagggccaggctccgcccttaaaagtctgtggaagaggctggctaatcacgttcgttattcggcttcgagacccc

SEQ ID NO: 365 - DNA, 122 bp, Homo sapiens
  misc_feature (61)..(62): /note="This region represents a CpG dinucleotide"
  misc_feature (61)..(61): /note="Nucleotide may be methylated to form 5-methylcytosine"
gaccatttcccggcataggctccggtgcccctgcccggctcccgccgggaagttctaggccgccgcacagaaagccctgccctccacgccgggtctctggagcgccctgggttgcccggccg

SEQ ID NO: 366 - DNA, 122 bp, Homo sapiens
  misc_feature (61)..(62): /note="This region represents a CpG dinucleotide"
  misc_feature (61)..(61): /note="Nucleotide may be methylated to form 5-methylcytosine"
aattaatgtctttctttcggcctgaaaagcttctagtgtttcttgcaagtcaggcctacccgtctttgattctgttggagggtctttaattcttaaccatggttttcaaagttctttgaaca

SEQ ID NO: 367 - DNA, 122 bp, Homo sapiens
  misc_feature (61)..(62): /note="This region represents a CpG dinucleotide"
  misc_feature (61)..(61): /note="Nucleotide may be methylated to form 5-methylcytosine"
aagtttcggttgaggagtaagagctgccgcgggagcagtaacccgcgcgggggaggccgacgtcggtcggagagggggtacgagagctgctggtggtgttgtcgtggccggagcggcccgcg

SEQ ID NO: 368 - DNA, 122 bp, Homo sapiens
  misc_feature (61)..(62): /note="This region represents a CpG dinucleotide"
  misc_feature (61)..(61): /note="Nucleotide may be methylated to form 5-methylcytosine"
aatctcccctcgggctcgacggatgtgcgccccagatgtgctgacacatgtccgatgcctcgctgccttggaggtctccccgctcgcgtgtctcttctcttcgcaccagcggcggaaaccgc

SEQ ID NO: 369 - DNA, 122 bp, Homo sapiens
  misc_feature (61)..(62): /note="This region represents a CpG dinucleotide"
  misc_feature (61)..(61): /note="Nucleotide may be methylated to form 5-methylcytosine"
taacctaactatagtgtttctgaagtctacagcagtgcacagtaatgtcctaggccctcacgttcactcaccactcactcactcactgacccacccagagcaacttcagtcctgcaagctcc

SEQ ID NO: 370 - DNA, 122 bp, Homo sapiens
  misc_feature (61)..(62): /note="This region represents a CpG dinucleotide"
  misc_feature (61)..(61): /note="Nucleotide may be methylated to form 5-methylcytosine"
gggggtggggaaaggggcgtaaccgggagggaccctccgaggcggagcggcgcaggggggcggggaaggcgggtcatggggcgggggcggtggggcgagtcatggggcggggacggggcggg

SEQ ID NO: 371 - DNA, 122 bp, Homo sapiens
  misc_feature (61)..(62): /note="This region represents a CpG dinucleotide"
  misc_feature (61)..(61): /note="Nucleotide may be methylated to form 5-methylcytosine"
ttctcttccctgccttcttcagaggccttcctatgtgtgcttagatttgtatcctaaatacgtatcattttaaaaagatgtataaaattgttttgggatgatttaaaactttatataaatga

SEQ ID NO: 372 - DNA, 122 bp, Homo sapiens
  misc_feature (61)..(62): /note="This region represents a CpG dinucleotide"
  misc_feature (61)..(61): /note="Nucleotide may be methylated to form 5-methylcytosine"
gttcaagatggaaggtggtagccacagttacacagatggtgaacctgcctgcagaagcaccgtagcacagcaatattcttgagcccttcctgtatggatggagaaaagagaaggctttgggg

SEQ ID NO: 373 - DNA, 122 bp, Homo sapiens
  misc_feature (61)..(62): /note="This region represents a CpG dinucleotide"
  misc_feature (61)..(61): /note="Nucleotide may be methylated to form 5-methylcytosine"
ttgtttagctcataagaggctaaccacattagagcatggagatgtgattatgcatctttacgttttgctgtttgcttttgtgtgcatgaagtatctttagaaggaaatgagaaatagagatt

SEQ ID NO: 374 - DNA, 122 bp, Homo sapiens
  misc_feature (61)..(62): /note="This region represents a CpG dinucleotide"
  misc_feature (61)..(61): /note="Nucleotide may be methylated to form 5-methylcytosine"
cttgccattcaccacttaggatgcctgcaaaccaactgttagttgctcctataaacatatcgtgggttcctttctcttgagagatttctttattgtacttggtggcagtgtctaaggaaaca

SEQ ID NO: 375 - DNA, 122 bp, Homo sapiens
  misc_feature (61)..(62): /note="This region represents a CpG dinucleotide"
  misc_feature (61)..(61): /note="Nucleotide may be methylated to form 5-methylcytosine"
taaggggttgtggataccaaggttttatcatgcagatgcagcctccaagtagcaggtgtccgaggcaatagatgataaatatttcttctcagacttaaggtctgtgttgatgttaatgaggc

SEQ ID NO: 376 - DNA, 122 bp, Homo sapiens
  misc_feature (61)..(62): /note="This region represents a CpG dinucleotide"
  misc_feature (61)..(61): /note="Nucleotide may be methylated to form 5-methylcytosine"
gtacatatgtataatatttgctttatccattcatccgttgatggacccttaggtcaattccgtatcttggcttttgtgaataatgatgcaatgaacatgggagtataggtatctctgacata

SEQ ID NO: 377 - DNA, 122 bp, Homo sapiens
  misc_feature (61)..(62): /note="This region represents a CpG dinucleotide"
  misc_feature (61)..(61): /note="Nucleotide may be methylated to form 5-methylcytosine"
ccgtagactccagcagcaggtcctgtcacagggttccgggcgggcactacgggcggagggcgacggcacgccagaggtgctgggcgtcgccaccagcccggccgccagtctatccagcaagg

SEQ ID NO: 378 - DNA, 122 bp, Homo sapiens
  misc_feature (61)..(62): /note="This region represents a CpG dinucleotide"
  misc_feature (61)..(61): /note="Nucleotide may be methylated to form 5-methylcytosine"
cgtccctctccggcccttgggcgcccagtcggaggtcggggcgggatggggcacgagtctcggggcggcccgcgctccccctactagtcccctcattgcctcggccccgtccccgcagcctc

SEQ ID NO: 379 - DNA, 122 bp, Homo sapiens
  misc_feature (61)..(62): /note="This region represents a CpG dinucleotide"
  misc_feature (61)..(61): /note="Nucleotide may be methylated to form 5-methylcytosine"
ctttccaggggctccagcacccactgcctgaatgtaaaatagagcatgtgtttgtatgagcgctcttctgggtagatggtctatagcttgtaccagattttcaaagaaatccatggcctaaa

SEQ ID NO: 380 - DNA, 122 bp, Homo sapiens
  misc_feature (61)..(62): /note="This region represents a CpG dinucleotide"
  misc_feature (61)..(61): /note="Nucleotide may be methylated to form 5-methylcytosine"
ttcatgtacacattttttggagatgtaagttttcatgtggacgtaagttttcatttctcacgaatatacacctaggaatggaattgctggcccatatggtaactctgtagttaaccttttga

SEQ ID NO: 381 - DNA, 122 bp, Homo sapiens
  misc_feature (61)..(62): /note="This region represents a CpG dinucleotide"
  misc_feature (61)..(61): /note="Nucleotide may be methylated to form 5-methylcytosine"
tgtactacttcctctgccacctggccttggtagacgcgggcttcactactagcgtggtgccgccgctgctggccaacctgcgcggaccagcgctctggctgccgcgcagccactgcacggcc

SEQ ID NO: 382 - DNA, 122 bp, Homo sapiens
  misc_feature (61)..(62): /note="This region represents a CpG dinucleotide"
  misc_feature (61)..(61): /note="Nucleotide may be methylated to form 5-methylcytosine"
aatagccggattcagcagggaaacagcgcctcctgacagctgctgtgtctggaggaaatacgaagcaccaatgaagtcagaggagagtccttcaagcagtaggaatgctttatcttctgagc

SEQ ID NO: 383 - DNA, 122 bp, Homo sapiens
  misc_feature (61)..(62): /note="This region represents a CpG dinucleotide"
  misc_feature (61)..(61): /note="Nucleotide may be methylated to form 5-methylcytosine"
acgagttactgggtgcagcacaccaacatggcacatataaacacatgtaacaaacctgtacgttgtgcacatgtatcctaaaacttaaagtataataataaaaaataaataaataaataatt

SEQ ID NO: 384 - DNA, 122 bp, Homo sapiens
  misc_feature (61)..(62): /note="This region represents a CpG dinucleotide"
  misc_feature (61)..(61): /note="Nucleotide may be methylated to form 5-methylcytosine"
caacccccctccttctgtgcttgagctctttatctgtgatttacaggctgagctttcaggcgccatttgttagaagagaagtaatttctttgaactgcatgaggttagaaagggagctattt

SEQ ID NO: 385 - DNA, 122 bp, Homo sapiens
  misc_feature (61)..(62): /note="This region represents a CpG dinucleotide"
  misc_feature (61)..(61): /note="Nucleotide may be methylated to form 5-methylcytosine"
atccaacctgatgccgaacagagaccttctgcagcagctctggccagaaatacagttctccggccttccctgggaaaaacagaagagctccaacagcagctgaatttggaaaagttcaagac

SEQ ID NO: 386 - DNA, 122 bp, Homo sapiens
  misc_feature (61)..(62): /note="This region represents a CpG dinucleotide"
  misc_feature (61)..(61): /note="Nucleotide may be methylated to form 5-methylcytosine"
cggtgcggtggggccggtcccgggtgctcgggccaatggcgcttcgcccgctccccgccccggcccgccccggcctcctcgcccggcacacagcgcctgccagcccctgccctctccccttc

SEQ ID NO: 387 - DNA, 122 bp, Homo sapiens
  misc_feature (61)..(62): /note="This region represents a CpG dinucleotide"
  misc_feature (61)..(61): /note="Nucleotide may be methylated to form 5-methylcytosine"
tggcctttaccctagagcagcttgctgaagtctcttctaaggtctgccacttctagatcacggctcttgtcacaaaacaatgatatggaacttgacacaagtaaagaaaacaaaggaaaaca

SEQ ID NO: 388 - DNA, 122 bp, Homo sapiens
  misc_feature (61)..(62): /note="This region represents a CpG dinucleotide"
  misc_feature (61)..(61): /note="Nucleotide may be methylated to form 5-methylcytosine"
caataagaaaagggcttatgagccagtttggaaatggaaaaattatatgaaatcagttttcgggaaagaaaatggaatttactcttaaatatatgaaaaaagattctcagcctcatccataa

SEQ ID NO: 389 - DNA, 122 bp, Homo sapiens
  misc_feature (61)..(62): /note="This region represents a CpG dinucleotide"
  misc_feature (61)..(61): /note="Nucleotide may be methylated to form 5-methylcytosine"
taaagtcctgtgcgatctcccgtaccaagcgctgaaaaggtagcttccggattagcagctcggtcgacttctggtagcggcggatctcgcgcagggccacggtgccggggcggtagcggtgg

SEQ ID NO: 390 - DNA, 122 bp, Homo sapiens
  misc_feature (61)..(62): /note="This region represents a CpG dinucleotide"
  misc_feature (61)..(61): /note="Nucleotide may be methylated to form 5-methylcytosine"
ccaacacacaggtgatcccggaggctgcaggcacccaggcacccaacacacaggtgatcccggaggctgcaggcacccaagacacaggtgatcccgaaggctgcaggcacccaagacacagg

SEQ ID NO: 391 - DNA, 122 bp, Homo sapiens
  misc_feature (61)..(62): /note="This region represents a CpG dinucleotide"
  misc_feature (61)..(61): /note="Nucleotide may be methylated to form 5-methylcytosine"
acaagtttttacacagatgtatgctttccattctcttggatatatagctaggaatggaatcggtgagtcatatggtaactctatgtttaactttttgaagaaatgcgaaactacttcccaaa

SEQ ID NO: 392 - DNA, 122 bp, Homo sapiens
  misc_feature (61)..(62): /note="This region represents a CpG dinucleotide"
  misc_feature (61)..(61): /note="Nucleotide may be methylated to form 5-methylcytosine"
ttttaaaaaggccaagtaaaacacaaaaataaaagaaaaaaagttattacattcattccacggagtattatgtagcctttaaaagagtagttgcaaaaaggatgtgaaaataaataaaacat

SEQ ID NO: 393 - DNA, 122 bp, Homo sapiens
  misc_feature (61)..(62): /note="This region represents a CpG dinucleotide"
  misc_feature (61)..(61): /note="Nucleotide may be methylated to form 5-methylcytosine"
gctgtacaattaaacctctgtctctgctgcaacctggtatctcagtgtattgacttgccacgcacgttggacaatgaacctattatggctgtaagatctcaataaggatttctgtttaagca

SEQ ID NO: 394 - DNA, 122 bp, Homo sapiens
  misc_feature (61)..(62): /note="This region represents a CpG dinucleotide"
  misc_feature (61)..(61): /note="Nucleotide may be methylated to form 5-methylcytosine"
cgacgcctcccggtggctctggcggcaccaatgcggggcaccggagcaggtgtccgactgcggtgcgggctaccactccgccggggaacctcgtcttgctcctccctgcgcttcgcctctgg

SEQ ID NO: 395 - DNA, 122 bp, Homo sapiens
  misc_feature (61)..(62): /note="This region represents a CpG dinucleotide"
  misc_feature (61)..(61): /note="Nucleotide may be methylated to form 5-methylcytosine"
acggacagtgagccctggcgctcgctgccctgcgccttaatttgctggcggcggcgatcccggaggcccgcagccagtcagcgccgtctcacgtcaccgcttcctgattccgccgccggggg

SEQ ID NO: 396 - DNA, 122 bp, Homo sapiens
  misc_feature (61)..(62): /note="This region represents a CpG dinucleotide"
  misc_feature (61)..(61): /note="Nucleotide may be methylated to form 5-methylcytosine"
ctgaaggttctagcttccagccttgaaattattctcctacttgtaggtcagtaaaacaagcgtttctttacttgaaagttttaagtcgacagttgccatgataaatcactcccactgatagt

SEQ ID NO: 397 - DNA, 122 bp, Homo sapiens
  misc_feature (61)..(62): /note="This region represents a CpG dinucleotide"
  misc_feature (61)..(61): /note="Nucleotide may be methylated to form 5-methylcytosine"
tgtatacacacgtacacctacgtagacttgtactagaatctaacatagcagtcttatttacgttaacccaaacttggaaatgagccaatgtcctttgacagtgaataaataaataaaccatg

SEQ ID NO: 398 - DNA, 122 bp, Homo sapiens
  misc_feature (61)..(62): /note="This region represents a CpG dinucleotide"
  misc_feature (61)..(61): /note="Nucleotide may be methylated to form 5-methylcytosine"
ccgcgcgctgcccacgattcgcttctgaggtgaggctagctagcgggggcggcgggggcccggttcgggctgaggcggcggcgggggcgcggggaactgggccgcggttgcggcgggcgggg

SEQ ID NO: 399 - DNA, 122 bp, Homo sapiens
  misc_feature (61)..(62): /note="This region represents a CpG dinucleotide"
  misc_feature (61)..(61): /note="Nucleotide may be methylated to form 5-methylcytosine"
ttcatttcctaatctttaaaaaaaaccattaaactacacctatttttcttcagttagtatcgtaaaagagactgcactgacatggttacgttcccaggaccctcagttctttagggatggac

SEQ ID NO: 400 - DNA, 122 bp, Homo sapiens
  misc_feature (61)..(62): /note="This region represents a CpG dinucleotide"
  misc_feature (61)..(61): /note="Nucleotide may be methylated to form 5-methylcytosine"
gcggcgggagcgcgaacggctggagctgggtgaggggcagtgccggcgcgggggcgggagcgggggcggagaggggcgcttctggaggggcggggtctacgcgaggggcggcccccctgacg

SEQ ID NO: 401 - DNA, 122 bp, Homo sapiens
  misc_feature (61)..(62): /note="This region represents a CpG dinucleotide"
  misc_feature (61)..(61): /note="Nucleotide may be methylated to form 5-methylcytosine"
cgcgaggcctgctgggctgacgtgacgtgaggctgggctgcggggcgccggaggcggaggcgggggcggggcgccgggaccgactagggcggggcgcggggtcggggggcggggcgcggggt

SEQ ID NO: 402 - DNA, 122 bp, Homo sapiens
  misc_feature (61)..(62): /note="This region represents a CpG dinucleotide"
  misc_feature (61)..(61): /note="Nucleotide may be methylated to form 5-methylcytosine"
ccagcactcagtcacagaatgtcatcacccccgaatcccagccgaggtcagggccttccgcgcgctccctcgtgcttttcactgtctgagtgattaacggagaggctggctgtttactacac

SEQ ID NO: 403 - DNA, 122 bp, Homo sapiens
  misc_feature (61)..(62): /note="This region represents a CpG dinucleotide"
  misc_feature (61)..(61): /note="Nucleotide may be methylated to form 5-methylcytosine"
tgaaccctggcagtgtaggctgcaatgagccatgattgggccactggactcctgcctgggcgacagggtaagaccctgcctcactctgtcaccccggctggcgtgcagtggtgagatcttgg

SEQ ID NO: 404 - DNA, 122 bp, Homo sapiens
  misc_feature (61)..(62): /note="This region represents a CpG dinucleotide"
  misc_feature (61)..(61): /note="Nucleotide may be methylated to form 5-methylcytosine"
ggtgcccaaggagggagtatttggaccagccctaggtcagagaggaatccctcataccagcgggaggaaactgagtcccagctggcttaaccaccagctgactaaagtagccttcatcttga

SEQ ID NO: 405 - DNA, 122 bp, Homo sapiens
  misc_feature (61)..(62): /note="This region represents a CpG dinucleotide"
  misc_feature (61)..(61): /note="Nucleotide may be methylated to form 5-methylcytosine"
gcctccgaaagttagtttccctggggtgttgccgctgcgccgcggggcggggggcgggggcgggggcggggacggcgaggccgtaagcggggaggcggggcggaagacagtgggcgtggccg

SEQ ID NO: 406 - DNA, 122 bp, Homo sapiens
  misc_feature (61)..(62): /note="This region represents a CpG dinucleotide"
  misc_feature (61)..(61): /note="Nucleotide may be methylated to form 5-methylcytosine"
aggcaggagaatcatttgaacctgggaggcggagtttgcagtgagctgagtttgcaccaccgcatgccggcctgggtgacagagcaagacactgtcccaatcaaccaatcaaaaaataaaca

SEQ ID NO: 407 - DNA, 122 bp, Homo sapiens
  misc_feature (61)..(62): /note="This region represents a CpG dinucleotide"
  misc_feature (61)..(61): /note="Nucleotide may be methylated to form 5-methylcytosine"
aaatactggagacggggatctcactatattgtccaggctggtgtggaactcttgagctcacgtgatcctcccgcctcagcctcccacagtgctgggattacaggcatgagccactacacggc

SEQ ID NO: 408 - DNA, 122 bp, Homo sapiens
  misc_feature (61)..(62): /note="This region represents a CpG dinucleotide"
  misc_feature (61)..(61): /note="Nucleotide may be methylated to form 5-methylcytosine"
gcacccctagagccagaagacgctaggtgggctgcgcgctctgccaggcgaaggctggagcgcagacggcaaagccgcgcgtttcagccgtggtcgggtccgcaggacctgggcgtggggac

SEQ ID NO: 409 - DNA, 122 bp, Homo sapiens
  misc_feature (61)..(62): /note="This region represents a CpG dinucleotide"
  misc_feature (61)..(61): /note="Nucleotide may be methylated to form 5-methylcytosine"
agacccgcgcagacccggcggcggacggcggctctcgactccggagagcggatcgcggggcgcaggagcccgatcgcgctggccatggcctccaactttaacgacatagtcaagcagggcta

SEQ ID NO: 410 - DNA, 122 bp, Homo sapiens
  misc_feature (61)..(62): /note="This region represents a CpG dinucleotide"
  misc_feature (61)..(61): /note="Nucleotide may be methylated to form 5-methylcytosine"
agcttctgggaggcctcaggaaacttacattcatggtggaaggcaaagaacaagccaacacgtcacatagagcaggaggaagggggagggggaggtgctacacacttttaaacaaccagatc

SEQ ID NO: 411 - DNA, 122 bp, Homo sapiens
  misc_feature (61)..(62): /note="This region represents a CpG dinucleotide"
  misc_feature (61)..(61): /note="Nucleotide may be methylated to form 5-methylcytosine"
ggtggctaggccgtgggccttgggagctgggcagtctgggctgggctgggctgggcagggcgccacatggaagctggaggagcaacgggagcgctgggcgtggggtgcaaattgcccggtgc

SEQ ID NO: 412 - DNA, 122 bp, Homo sapiens
  misc_feature (61)..(62): /note="This region represents a CpG dinucleotide"
  misc_feature (61)..(61): /note="Nucleotide may be methylated to form 5-methylcytosine"
ttacatgaaattcaaatgtcagtgttcataaaggaagtttcattggagcacagccacacccgttcatactatcaatggttgtttcatactacaatggcagttgagtaattgctacagagacc

SEQ ID NO: 413 - DNA, 122 bp, Homo sapiens
  misc_feature (61)..(62): /note="This region represents a CpG dinucleotide"
  misc_feature (61)..(61): /note="Nucleotide may be methylated to form 5-methylcytosine"
cgagcccctcctgggtggaaactacccggaggcgccgagtggagcctgcttagcccgagccgacgccgccggcagcgccaccccccgcccgccctcctagtccccgggacgccccccaccca

SEQ ID NO: 414 - DNA, 122 bp, Homo sapiens
  misc_feature (61)..(62): /note="This region represents a CpG dinucleotide"
  misc_feature (61)..(61): /note="Nucleotide may be methylated to form 5-methylcytosine"
ctaaaggtcacgggatttgactcttcttttatgaagcagtttgtttcaattaattgactacggcatatcaatcatagcaagagtggcaagtaaatctaaattgtgaaatgccataaattttc

SEQ ID NO: 415 - DNA, 122 bp, Homo sapiens
  misc_feature (61)..(62): /note="This region represents a CpG dinucleotide"
  misc_feature (61)..(61): /note="Nucleotide may be methylated to form 5-methylcytosine"
ggaggcgggggaggtgcggagatggcgctctgcacggcggcggagggagggcgctggcgccggggacacgaaaccgcagagcccggacgagtcagggagtgaggcgcgagccgggcgcccgg

SEQ ID NO: 416 - DNA, 122 bp, Homo sapiens
  misc_feature (61)..(62): /note="This region represents a CpG dinucleotide"
  misc_feature (61)..(61): /note="Nucleotide may be methylated to form 5-methylcytosine"
ctttttcttttttttgtctcagtccagagcactctctcagaatttaattctgaataatgccgtgttatttatttattcatttttaagtttctactagacttcaggttttgtgaattgagttg

SEQ ID NO: 417 - DNA, 122 bp, Homo sapiens
  misc_feature (61)..(62): /note="This region represents a CpG dinucleotide"
  misc_feature (61)..(61): /note="Nucleotide may be methylated to form 5-methylcytosine"
tcctcgcgctgctgcagcaaagggctcgtcctccctcagtcgcgaaggagattatcctagcgttgcgccatgttatgccctcgcctccccttccttcctcgccgccggctccaaagcctcgc

SEQ ID NO: 418 - DNA, 122 bp, Homo sapiens
  misc_feature (61)..(62): /note="This region represents a CpG dinucleotide"
  misc_feature (61)..(61): /note="Nucleotide may be methylated to form 5-methylcytosine"
aatccggctgataatctcctcttgcctgagaatcgggccaggcgccctttactaatttcgcgcgctggggacctggggctgccgcctctcggccgcgcggggcaggtgctgcgtccccagcg

SEQ ID NO: 419 - DNA, 122 bp, Homo sapiens
  misc_feature (61)..(62): /note="This region represents a CpG dinucleotide"
  misc_feature (61)..(61): /note="Nucleotide may be methylated to form 5-methylcytosine"
tcttggctaacacggtgaatccccgtctctactaaacatacaaaaacaaaactagccgggcgtggtggcgggcgcctgtagtcccagctactccggaggctgaggcaggagaatggcgtgaa

SEQ ID NO: 420 - DNA, 122 bp, Homo sapiens
  misc_feature (61)..(62): /note="This region represents a CpG dinucleotide"
  misc_feature (61)..(61): /note="Nucleotide may be methylated to form 5-methylcytosine"
tggtgaaaaagcaaggtgcggtgtacctggagcgaacaccatgatttcttccagccgctacgcccccagattaagagagaaagacaggcagacggaggatgggaagaaggccggacttggcg

SEQ ID NO: 421 - DNA, 122 bp, Homo sapiens
  misc_feature (61)..(62): /note="This region represents a CpG dinucleotide"
  misc_feature (61)..(61): /note="Nucleotide may be methylated to form 5-methylcytosine"
ggcggtgcgagctccccgcctgcgggacgcacggagaccgcggtcagcgcgccgcctggccggcccagcgcgcccagcccgcgcccagccccgtccactcccgtccagccccgccgcccggc

SEQ ID NO: 422 - DNA, 122 bp, Homo sapiens
  misc_feature (61)..(62): /note="This region represents a CpG dinucleotide"
  misc_feature (61)..(61): /note="Nucleotide may be methylated to form 5-methylcytosine"
ttaattcatctctgaatacccatagcttaattccctctgtgcagacagaaacctcccccgcgagaagaaagattgctcagcctcatcagcttggaaaaggctgccacaggcactcgtgctgc

SEQ ID NO: 423 - DNA, 122 bp, Homo sapiens
  misc_feature (61)..(62): /note="This region represents a CpG dinucleotide"
  misc_feature (61)..(61): /note="Nucleotide may be methylated to form 5-methylcytosine"
aaagcatgggaaagacctgcccccatgattcaattacctcccactgagtccctctcacaacgcatgagaattcaagatgagatttgggtgtgaacacaaccaaaccatatcaacaagtatag

SEQ ID NO: 424 - DNA, 122 bp, Homo sapiens
  misc_feature (61)..(62): /note="This region represents a CpG dinucleotide"
  misc_feature (61)..(61): /note="Nucleotide may be methylated to form 5-methylcytosine"
aaggtttccagtgagtctttctgttcaggacattcataacaaaagcctccgagcagagaacgagcccctggggagtgcccacacagtcaaccccaacagcccagtctctgaaccgtagcctc

SEQ ID NO: 425 - DNA, 122 bp, Homo sapiens
  misc_feature (61)..(62): /note="This region represents a CpG dinucleotide"
  misc_feature (61)..(61): /note="Nucleotide may be methylated to form 5-methylcytosine"
gtgaggtcggcgatccgggtgtagctggggttgcaggcttggcaggcacggcggcggtatcgggaggcacagcgatcttgagggactcaaaaggctgggacaactgagaccccgtgttctgg

SEQ ID NO: 426 - DNA, 122 bp, Homo sapiens
  misc_feature (61)..(62): /note="This region represents a CpG dinucleotide"
  misc_feature (61)..(61): /note="Nucleotide may be methylated to form 5-methylcytosine"
aaaaaaaaaaaaaagcaatgagccgcaagccttggactcgcagagctgccggtgcccgtccgagagccccaccagcgcggctcacgcctcagtctcgccgccccaaggtgggatccgacgcc

SEQ ID NO: 427 - DNA, 122 bp, Homo sapiens
  misc_feature (61)..(62): /note="This region represents a CpG dinucleotide"
  misc_feature (61)..(61): /note="Nucleotide may be methylated to form 5-methylcytosine"
aatttctttttgagacagggtcttgctctgccacccagcctggagtgcagagtgcagtgacgcattctcagctcactgcaacccctgccttttggtgtcaagcgatcctcccacctcagcct

SEQ ID NO: 428 - DNA, 122 bp, Homo sapiens
  misc_feature (61)..(62): /note="This region represents a CpG dinucleotide"
  misc_feature (61)..(61): /note="Nucleotide may be methylated to form 5-methylcytosine"
aaaaaattagctgggtgcagcggcatgcacctgtagtcccagctacttgggaggctgaggcgagaggctcacttgagccccagaaattcaaggctgcagtgagctgtgatcgtaccactgta

SEQ ID NO: 429 - DNA, 122 bp, Homo sapiens
  misc_feature (61)..(62): /note="This region represents a CpG dinucleotide"
  misc_feature (61)..(61): /note="Nucleotide may be methylated to form 5-methylcytosine"
gccgccgcaacgaaggtggatccgcatcttgattgttctccgggagcctcctgggggctccggcggcggcgcgggcgcgacccatcccgctggcgctccccgctcgctgaaccccgtttgcc

SEQ ID NO: 430 - DNA, 122 bp, Homo sapiens
  misc_feature (61)..(62): /note="This region represents a CpG dinucleotide"
  misc_feature (61)..(61): /note="Nucleotide may be methylated to form 5-methylcytosine"
agcctccagtcgcctctctgtgcatgcacctcggtcactggtctcgactaatggtttctccgggagcccagttaacagggaaaaattcgcatggcctctcggtttcttcggtccgaaaatcc

SEQ ID NO: 431 - DNA, 122 bp, Homo sapiens
  misc_feature (61)..(62): /note="This region represents a CpG dinucleotide"
  misc_feature (61)..(61): /note="Nucleotide may be methylated to form 5-methylcytosine"
gttctaaaagaagaccaagcatggtggctcacaacctgtaatctcaggactttgtgaggccgaggccggaggattgcttgagcccaggagtttgagacaagcctgggcaacgtggcaagact

SEQ ID NO: 432 - DNA, 122 bp, Homo sapiens
  misc_feature (61)..(62): /note="This region represents a CpG dinucleotide"
  misc_feature (61)..(61): /note="Nucleotide may be methylated to form 5-methylcytosine"
acttctgaaggtcaggcagagagaagaatgcacaaggaggctcaagtacagctttggtaacgtagcaagaccctgtctctacaaaaaagtaaaaaaaatagctgggctggtagtgtgtacct

SEQ ID NO: 433 - DNA, 122 bp, Homo sapiens
  misc_feature (61)..(62): /note="This region represents a CpG dinucleotide"
  misc_feature (61)..(61): /note="Nucleotide may be methylated to form 5-methylcytosine"
aggcagatgctgattaatttttctctaattagctttctgttcccaaacagcttcaaacaacgtttttctaggggagttttctggaaggtaggcagtagaacaataactcctcttaggaacta

SEQ ID NO: 434 - DNA, 122 bp, Homo sapiens
  misc_feature (61)..(62): /note="This region represents a CpG dinucleotide"
  misc_feature (61)..(61): /note="Nucleotide may be methylated to form 5-methylcytosine"
cagaagaaatctggcaacatatggagacatttttcattgtcaccacttggtggaggagggcgctgctagcatctggtgaatagaggctagggacgctgttaaatattttgtagtttacagga

SEQ ID NO: 435 - DNA, 122 bp, Homo sapiens
  misc_feature (61)..(62): /note="This region represents a CpG dinucleotide"
  misc_feature (61)..(61): /note="Nucleotide may be methylated to form 5-methylcytosine"
tcctcggtgagggtcgttccaaatcgtggccgacagtagcgggctgcaccctccttagatcgcgtcgtggccagcctcagctgcagaaccccgccgggcgcccgggagccctgtcccgccgc

SEQ ID NO: 436 - DNA, 122 bp, Homo sapiens
  misc_feature (61)..(62): /note="This region represents a CpG dinucleotide"
  misc_feature (61)..(61): /note="Nucleotide may be methylated to form 5-methylcytosine"
agttcaagaccagcctgggcaacatggtaaaactctgtctactaaattgcaaaaattagccgggcatgatggcgggcacctgtagtcccagctactcgggaggctgaggcaggagaattgct

SEQ ID NO: 437 - DNA, 122 bp, Homo sapiens
  misc_feature (61)..(62): /note="This region represents a CpG dinucleotide"
  misc_feature (61)..(61): /note="Nucleotide may be methylated to form 5-methylcytosine"
ccccgcggccgccgccatggagggcagggcggtggtgagcagactgctgccgtccgggaccggcaccgggatggagtaggggctgtagcgcagccgcgggcgcatggtgttcagattgagga

SEQ ID NO: 438 - DNA, 122 bp, Homo sapiens
  misc_feature (61)..(62): /note="This region represents a CpG dinucleotide"
  misc_feature (61)..(61): /note="Nucleotide may be methylated to form 5-methylcytosine"
cgtgatctgcccgcttcggactgccaaagtgctgcgattacaggtgtcagccactgtgtccggcccggcgttgatcttaattcttacataaaagataatgataacaccattggtagaaatca

SEQ ID NO: 439 - DNA, 122 bp, Homo sapiens
  misc_feature (61)..(62): /note="This region represents a CpG dinucleotide"
  misc_feature (61)..(61): /note="Nucleotide may be methylated to form 5-methylcytosine"
cggcagccgggacccctgggcgccctgtctcgtcgccgcgcggcgactgcggccccagcccgggagccctctctggacagctccgcgcccgcagcccggagcctctccatattgtgcggggc

SEQ ID NO: 440 - DNA, 122 bp, Homo sapiens
  misc_feature (61)..(62): /note="This region represents a CpG dinucleotide"
  misc_feature (61)..(61): /note="Nucleotide may be methylated to form 5-methylcytosine"
cagtttctagcctgtcctacccgaatttgcatgtcccgtctcaaagcctcatgcaagccacgtgctctcttcccatctgatgagactgcagcgcccttccttccatttctctctgctcaagg

SEQ ID NO: 441 - DNA, 122 bp, Homo sapiens
  misc_feature (61)..(62): /note="This region represents a CpG dinucleotide"
  misc_feature (61)..(61): /note="Nucleotide may be methylated to form 5-methylcytosine"
atgttgcctaggctggagcgcagtggctattcacaggcacaatcacactcactgcagtctcgaacccctgggctcagtcagtcctcctgcctcagcctcctgagtagctgggaatacaggtg

SEQ ID NO: 442 - DNA, 122 bp, Homo sapiens
  misc_feature (61)..(62): /note="This region represents a CpG dinucleotide"
  misc_feature (61)..(61): /note="Nucleotide may be methylated to form 5-methylcytosine"
tctcatagttctgaagactgggaagtccgggttcaaggttctggcagattcagtgcctgtcgagggactgctttttggttcacagatagtgtcttctagctgtctcctcatgtggtagaagg

SEQ ID NO: 443 - DNA, 122 bp, Homo sapiens
  misc_feature (61)..(62): /note="This region represents a CpG dinucleotide"
  misc_feature (61)..(61): /note="Nucleotide may be methylated to form 5-methylcytosine"
gtccggcttggcttccaagccgctaaccaaccgctggatgctctgcagttcgctggtggccgcctctttctccgcgcagagtttgggcgacaaggacatggagctggaggagagcgtggagg

SEQ ID NO: 444 - DNA, 122 bp, Homo sapiens
  misc_feature (61)..(62): /note="This region represents a CpG dinucleotide"
  misc_feature (61)..(61): /note="Nucleotide may be methylated to form 5-methylcytosine"
gcaccagcttttttaaagactaattttactaacctgtactggatttaattgtctcctttccgattgattggcccagcaggtcatattgatttaacctagagccatcaggagcaacctgtact

SEQ ID NO: 445 - DNA, 122 bp, Homo sapiens
  misc_feature (61)..(62): /note="This region represents a CpG dinucleotide"
  misc_feature (61)..(61): /note="Nucleotide may be methylated to form 5-methylcytosine"
tttggcattggctttgctccatggggtctactacagaacttaaggattagggttttattccgaataaaaaaaaaattgaataattaggacacttcaactttcttcaaacacccctgaagcta

SEQ ID NO: 446 - DNA, 122 bp, Homo sapiens
  misc_feature (61)..(62): /note="This region represents a CpG dinucleotide"
  misc_feature (61)..(61): /note="Nucleotide may be methylated to form 5-methylcytosine"
atacttgggccatgaacaagttacttaacctctctaaacatcactttccctatctttaaacgggaataattctagtatcaactacatagggttgttgtgaggattaaatgagtccaatgtat

SEQ ID NO: 447 - DNA, 122 bp, Homo sapiens
  misc_feature (61)..(62): /note="This region represents a CpG dinucleotide"
  misc_feature (61)..(61): /note="Nucleotide may be methylated to form 5-methylcytosine"
ctttgttttcttgatacagggtttcactctgtcaccctggctggagtgctattgcacaatcgtggctcactgcagccttgacctcctggactcaagcaatcctcctaccttactctcctgag

SEQ ID NO: 448 - DNA, 122 bp, Homo sapiens
  misc_feature (61)..(62): /note="This region represents a CpG dinucleotide"
  misc_feature (61)..(61): /note="Nucleotide may be methylated to form 5-methylcytosine"
ggcctcaccaactcggttgcgcaaaccgcgctcctggctgagcggccgctgtgcgcgccccgcctgctggaccacttcatctgtgagctgccggcgttgctcaagctggcctgcggaggcga

SEQ ID NO: 449 - DNA, 122 bp, Homo sapiens
  misc_feature (61)..(62): /note="This region represents a CpG dinucleotide"
  misc_feature (61)..(61): /note="Nucleotide may be methylated to form 5-methylcytosine"
gatatttcaacaattatttggcaaagtctaactatcttatgatataaacactcaacaaaccgggaatagaaaagagttgttttttgatcaaataaggagtacctatgtaattccatagctaa

SEQ ID NO: 450 - DNA, 122 bp, Homo sapiens
  misc_feature (61)..(62): /note="This region represents a CpG dinucleotide"
  misc_feature (61)..(61): /note="Nucleotide may be methylated to form 5-methylcytosine"
tatggtggtgactctcagtcttcttgggcagcagcactgcctgaatgttaggcaggactccgccctgggcaatggtcacgccgcccaaaagcttattgagttcctcatcattgcggatcgct

SEQ ID NO: 451 - DNA, 122 bp, Homo sapiens
  misc_feature (61)..(62): /note="This region represents a CpG dinucleotide"
  misc_feature (61)..(61): /note="Nucleotide may be methylated to form 5-methylcytosine"
agcatcaatgtcaacttcttcacagtatacagagccacttaaacaaacacacagcagacacgtgggcatttctaaattgggaataaaatcataaaaatatgaacaatcgtttgaaaatattt

SEQ ID NO: 452 - DNA, 122 bp, Homo sapiens
  misc_feature (61)..(62): /note="This region represents a CpG dinucleotide"
  misc_feature (61)..(61): /note="Nucleotide may be methylated to form 5-methylcytosine"
tcatggccaaaaacttagttttcaagtttactctgggatccccttggccaagagcgtgtccgttcagttaatctaggggcttgggattttatttttattcctcaaatgtaacaaatttaaag

SEQ ID NO: 453 - DNA, 122 bp, Homo sapiens
  misc_feature (61)..(62): /note="This region represents a CpG dinucleotide"
  misc_feature (61)..(61): /note="Nucleotide may be methylated to form 5-methylcytosine"
cggtagagtttccaacacgaaagcccgtgtggtcgcgccgggagctcacggcgttccaagcggcacttatcccgcgttgatgcccaggcaccccgcgcgccctgtttcaccaggcccagtca

SEQ ID NO: 454 - DNA, 122 bp, Homo sapiens
  misc_feature (61)..(62): /note="This region represents a CpG dinucleotide"
  misc_feature (61)..(61): /note="Nucleotide may be methylated to form 5-methylcytosine"
gtgcagtggtacaaacgtaattcactgcaatctcaacctcctgggctcaagggctcctctcgttttagcctctcaagtatctgggactaaaggcgtgtgctaccattcctggctaatttttt

SEQ ID NO: 455 - DNA, 122 bp, Homo sapiens
  misc_feature (61)..(62): /note="This region represents a CpG dinucleotide"
  misc_feature (61)..(61): /note="Nucleotide may be methylated to form 5-methylcytosine"
tctcgacgccccgtgccgccctccaccgggccccagccgccagccctagccccggctccccggtgcccacgccgtccccccgcgctctccccggccggcactaacccccatggccgcgcttc

SEQ ID NO: 456 - DNA, 122 bp, Homo sapiens
  misc_feature (61)..(62): /note="This region represents a CpG dinucleotide"
  misc_feature (61)..(61): /note="Nucleotide may be methylated to form 5-methylcytosine"
ggggaggaatattagactcggaggagtctgcgcgcttttctcctccccgcgcctcccggtcgccgcgggttcaccgctcagtccccgcgctcgctccgcaccccacccacttcctgtgctcg

SEQ ID NO: 457 - DNA, 122 bp, Homo sapiens
  misc_feature (61)..(62): /note="This region represents a CpG dinucleotide"
  misc_feature (61)..(61): /note="Nucleotide may be methylated to form 5-methylcytosine"
ggccagagagacaaagagatgcacagagggcgccttccagtggggacccgacgacggaggcggggcctgcagaggcgcgaccgaaggggaggggtccggggcggggtttctaagggggcgtg

SEQ ID NO: 458 - DNA, 122 bp, Homo sapiens
  misc_feature (61)..(62): /note="This region represents a CpG dinucleotide"
  misc_feature (61)..(61): /note="Nucleotide may be methylated to form 5-methylcytosine"
cctcggggaacaaaaccgtgaaggctaattaggacaagtcggagcagggaacggggacgccgggaggggagagcgcgctccgagttgggcagaacctggaacggtcacaggaaacccgggcg

SEQ ID NO: 459 - DNA, 122 bp, Homo sapiens
  misc_feature (61)..(62): /note="This region represents a CpG dinucleotide"
  misc_feature (61)..(61): /note="Nucleotide may be methylated to form 5-methylcytosine"
aggtgtgatactggtattgtggttatgtttttaaaaagtctttatgtttttagctgggtgcggtggctcaggactgtaattccagctacatgagaggattgcctgaggccaggagtttgaga

SEQ ID NO: 460 - DNA, 122 bp, Homo sapiens
  misc_feature (61)..(62): /note="This region represents a CpG dinucleotide"
  misc_feature (61)..(61): /note="Nucleotide may be methylated to form 5-methylcytosine"
ggcagcggcggcgggagcgggcggtgcgggccccgaacctggctggggaggcggcggtagcgcgggaatgtccccaggagcctcggggccgctagcgctcatgccggcctcccgccgctccg

SEQ ID NO: 461 - DNA, 122 bp, Homo sapiens
  misc_feature (61)..(62): /note="This region represents a CpG dinucleotide"
  misc_feature (61)..(61): /note="Nucleotide may be methylated to form 5-methylcytosine"
aggggagctgcgaggcgaagtgttcttcagggaagcgggctcgagtctccgcagctgcggcggcggcggcggcgcgctgggccggcggcgggcgcgggcagggggccgggggtgccgcgcgg

SEQ ID NO: 462 - DNA, 122 bp, Homo sapiens
  misc_feature (61)..(62): /note="This region represents a CpG dinucleotide"
  misc_feature (61)..(61): /note="Nucleotide may be methylated to form 5-methylcytosine"
cgccccgggggcacgtggagcggcctctggctcacctgcgcctcccgggccccagcccagcgccgccgcgtcaccgcccctcccgcggccccgccccagcccggctcattggctgccgctcg

SEQ ID NO: 463 - DNA, 122 bp, Homo sapiens
  misc_feature (61)..(62): /note="This region represents a CpG dinucleotide"
  misc_feature (61)..(61): /note="Nucleotide may be methylated to form 5-methylcytosine"
cgagacacagtgagagcgagacacagtgagagcgagacacagtgagagcgagacacagagcgagacagtgagagcgagacagagcgagacagtgagagcgagacagagcgagagacagtgag

SEQ ID NO: 464 - DNA, 122 bp, Homo sapiens
  misc_feature (61)..(62): /note="This region represents a CpG dinucleotide"
  misc_feature (61)..(61): /note="Nucleotide may be methylated to form 5-methylcytosine"
ggctggcttgcttcttgtcagttagcaaggacgtgattagaatcctactcggcctctcgccggctcctcgctcgccgcctgcattacttgcagattcagtttgcgtgtctccagccaagcgg

SEQ ID NO: 465 - DNA, 122 bp, Homo sapiens
  misc_feature (61)..(62): /note="This region represents a CpG dinucleotide"
  misc_feature (61)..(61): /note="Nucleotide may be methylated to form 5-methylcytosine"
cggaacatacgtttccggaccccaaaatcactcagcaaaggtaagtcaagctggaaactgcgtcaggcaaacctgcttcccattttatttctaaataaaatagctgcaaagatttaaaaaaa

SEQ ID NO: 466 - DNA, 122 bp, Homo sapiens
  misc_feature (61)..(62): /note="This region represents a CpG dinucleotide"
  misc_feature (61)..(61): /note="Nucleotide may be methylated to form 5-methylcytosine"
aggcaccatggctcatgcctgtaatcccaacactttgggaggccaaggtgggaggatcaccggagcccaaaagttcaagacaagcctgtgccacacagggagactccaactcatttttattt

SEQ ID NO: 467 - DNA, 122 bp, Homo sapiens
  misc_feature (61)..(62): /note="This region represents a CpG dinucleotide"
  misc_feature (61)..(61): /note="Nucleotide may be methylated to form 5-methylcytosine"
gcagccaatggctgtgatcaaaaattcaacacaaaatcaaacttgaagaaacattttgaacgcaaacatgaaaatcaacaaaaacaatatatagtaagtatgattttatatgcttaaatttt

SEQ ID NO: 468 - DNA, 122 bp, Homo sapiens
  misc_feature (61)..(62): /note="This region represents a CpG dinucleotide"
  misc_feature (61)..(61): /note="Nucleotide may be methylated to form 5-methylcytosine"
ttctttcctcacaaaacccctgtgctgtgttagcttattttcttggatgacggcgaagagcgaatctgaagaagaacgcctgggcttgtgtcccagatctgcacttattgacacctaactcc

SEQ ID NO: 469 - DNA, 122 bp, Homo sapiens
  misc_feature (61)..(62): /note="This region represents a CpG dinucleotide"
  misc_feature (61)..(61): /note="Nucleotide may be methylated to form 5-methylcytosine"
gggcctcgggtttggcggcccggaggagcgggctgcggattacctgcagcagcggggagccgccgagctcctccccgcccgcccccacaccccacccccaccgctgcactaaccccggctca

SEQ ID NO: 470 - DNA, 122 bp, Homo sapiens
  misc_feature (61)..(62): /note="This region represents a CpG dinucleotide"
  misc_feature (61)..(61): /note="Nucleotide may be methylated to form 5-methylcytosine"
taaagagaatggaatataaaagacttagaaatcagaaatatttaatctacatccatcttacgtatttatgatactgaagatatgtgagagatgtaaaaatgttagattcttttccatcattt

SEQ ID NO: 471 - DNA, 122 bp, Homo sapiens
  misc_feature (61)..(62): /note="This region represents a CpG dinucleotide"
  misc_feature (61)..(61): /note="Nucleotide may be methylated to form 5-methylcytosine"
gctccctctcactcttgccttgtcttgactttctgccttccaatatgagatgatacagcacgaaggccatcaccagatgtgggccctttgacattggactttccagtctctagaacagtgaa

SEQ ID NO: 472 - DNA, 122 bp, Homo sapiens
  misc_feature (61)..(62): /note="This region represents a CpG dinucleotide"
  misc_feature (61)..(61): /note="Nucleotide may be methylated to form 5-methylcytosine"
ttttgtagagatgaggtctcactttgttgcccaggctggtgtaccaatttttactccagccgtataaaagttcttgttttcccatatattcctaacacttggtattagagtactttttttta

SEQ ID NO: 473 - DNA, 122 bp, Homo sapiens
  misc_feature (61)..(62): /note="This region represents a CpG dinucleotide"
  misc_feature (61)..(61): /note="Nucleotide may be methylated to form 5-methylcytosine"
ctgggccgagtttgaggagccgagggcacccaggggcggtgcggccggcagagtgggctccggggacggcccgggctggcgctgagcggccgtcgaggacccacaggctcgtccgctcctgg

SEQ ID NO: 474 - DNA, 122 bp, Homo sapiens
  misc_feature (61)..(62): /note="This region represents a CpG dinucleotide"
  misc_feature (61)..(61): /note="Nucleotide may be methylated to form 5-methylcytosine"
cctagacgcgcttacccgacctgcgcgggccggaccccgccttgcacacgccttcctgtccgcctttccgaggccccgcctcccggccctcgctagcctaccgggccccgccccgtaccatt

SEQ ID NO: 475 - DNA, 122 bp, Homo sapiens
  misc_feature (61)..(62): /note="This region represents a CpG dinucleotide"
  misc_feature (61)..(61): /note="Nucleotide may be methylated to form 5-methylcytosine"
atgaatacatttacaggcgtaaatgcaaaccgcttccaactcaaagcaagtaacagcccacggtgttctggccaaagacatcagctaagaaaggaaactgggtcctacggcttggactttcc

SEQ ID NO: 476 - DNA, 122 bp, Homo sapiens
  misc_feature (61)..(62): /note="This region represents a CpG dinucleotide"
  misc_feature (61)..(61): /note="Nucleotide may be methylated to form 5-methylcytosine"
atggctgctgcctagggatggcacataaattcagaaagcattccatattttgcatagttccgggaaggtcatttgactatttgtcgagtagctccaaggaagcagtgtgagtgaaaccaaaa

SEQ ID NO: 477 - DNA, 122 bp, Homo sapiens
  misc_feature (61)..(62): /note="This region represents a CpG dinucleotide"
  misc_feature (61)..(61): /note="Nucleotide may be methylated to form 5-methylcytosine"
gtttggttggttgtttgtttcaagttgtccctttcaatgagcattctttaaaaaaaattacgtgacagtatggttagatttatgctgtttgtaaaaagcagaaaagattgattttctactaa

SEQ ID NO: 478 - DNA, 122 bp, Homo sapiens
  misc_feature (61)..(62): /note="This region represents a CpG dinucleotide"
  misc_feature (61)..(61): /note="Nucleotide may be methylated to form 5-methylcytosine"
tgattcagcgatggatgaataaacgtacactgacacacagatattctgctctgccagtcccgctgagggtcccagtcgcttacaggcttcctgctgagccctgtaaacagttgccactgggc

SEQ ID NO: 479 - DNA, 122 bp, Homo sapiens
  misc_feature (61)..(62): /note="This region represents a CpG dinucleotide"
  misc_feature (61)..(61): /note="Nucleotide may be methylated to form 5-methylcytosine"
tactgagacccgcagggagaaagcgcgccccctcctgcgcccggctcgcccctctgcagccgctgcctgaggtctccgcctccaggtcccgcgcgcagcttcactccactcggtgaagcggt

SEQ ID NO: 480 - DNA, 122 bp, Homo sapiens
  misc_feature (61)..(62): /note="This region represents a CpG dinucleotide"
  misc_feature (61)..(61): /note="Nucleotide may be methylated to form 5-methylcytosine"
aaaaaggctatatttgtttcaagatacacacaaccacagagacatgcatactcacacacacgcacccacacacacgcatgcactcatgcacccacacatgcacccatacacatacacataca

SEQ ID NO: 481 - DNA, 122 bp, Homo sapiens
  misc_feature (61)..(62): /note="This region represents a CpG dinucleotide"
  misc_feature (61)..(61): /note="Nucleotide may be methylated to form 5-methylcytosine"
actattcacaagggtccatgtgcttttaaaaccattctgccagatacaaatagctataaacgtcatgagtggttatgagatacaagtgtttaagaaataaactgtatagattcagtaaatcc

SEQ ID NO: 482 - DNA, 122 bp, Homo sapiens
  misc_feature (61)..(62): /note="This region represents a CpG dinucleotide"
  misc_feature (61)..(61): /note="Nucleotide may be methylated to form 5-methylcytosine"
taggtttgggtcactgccatcatatctgcattagagggcacctcaagctcaggaatgctacggctcttgcagactcagaggtaccaccttagtggtcttgcataagatctgagagaatcttt

SEQ ID NO: 483 - DNA, 122 bp, Homo sapiens
  misc_feature (61)..(62): /note="This region represents a CpG dinucleotide"
  misc_feature (61)..(61): /note="Nucleotide may be methylated to form 5-methylcytosine"
tcacctgttatgacagaattcttaactctccttttatgagctctgtagtattctctttcacgggttttcctatgcttttaattgttttctcttatccttgtctgcatttcctttttactttt

SEQ ID NO: 484 - DNA, 122 bp, Homo sapiens
  misc_feature (61)..(62): /note="This region represents a CpG dinucleotide"
  misc_feature (61)..(61): /note="Nucleotide may be methylated to form 5-methylcytosine"
ttccgccgcgtttgtgggctggtagcccggaatacatttcccagaggccttcgcggccgacgtgcttcgcgcaggaacgcagccgcctcccgactggaggacgcggtagcggagctgctcaa

SEQ ID NO: 485 - DNA, 122 bp, Homo sapiens
  misc_feature (61)..(62): /note="This region represents a CpG dinucleotide"
  misc_feature (61)..(61): /note="Nucleotide may be methylated to form 5-methylcytosine"
tgaagcagtttctggacttcggtacggagtgggcgggaggcggctggcagcggaggccggcggggcgctgggaggggcagccgggggctagggggacggaggagaagaaaggccccgagtga

SEQ ID NO: 486 - DNA, 122 bp, Homo sapiens
  misc_feature (61)..(62): /note="This region represents a CpG dinucleotide"
  misc_feature (61)..(61): /note="Nucleotide may be methylated to form 5-methylcytosine"
ttggcaatgagacactggtgatgggtgcattgccaccttaatatacttaccaccgaccaccgaattgtacaccttcaaggggagaattttatggcatgtgaattatatctccacaaagccca

SEQ ID NO: 487 - DNA, 122 bp, Homo sapiens
  misc_feature (61)..(62): /note="This region represents a CpG dinucleotide"
  misc_feature (61)..(61): /note="Nucleotide may be methylated to form 5-methylcytosine"
ccacaggtgtcagaaacaaggacctctcccgcgaacgcctcagtgtcccgacgccgggtccgggctgcagacctgtgaacagtcgccgctctctcgctgcttcaggattcgggttaggatga

SEQ ID NO: 488 - DNA, 122 bp, Homo sapiens
  misc_feature (61)..(62): /note="This region represents a CpG dinucleotide"
  misc_feature (61)..(61): /note="Nucleotide may be methylated to form 5-methylcytosine"
gtagaaaaaaaaaaatgcttgagttaaggtgtgctgtggaagccaaggttcttattatgtcgatgaagcctccaggtagcaaccctgagagagaataaatggtaaatgtttctcttaaacct

SEQ ID NO: 489 - DNA, 122 bp, Homo sapiens
  misc_feature (61)..(62): /note="This region represents a CpG dinucleotide"
  misc_feature (61)..(61): /note="Nucleotide may be methylated to form 5-methylcytosine"
cgtccagccatgccagtgcgctccggcagcagtacgcgcagcagtccgcgcagcagtcggcgtccgcctcccagtaccaccagtgccacagcctgcagcccgccgccagccccacgggcagc

SEQ ID NO: 490 - DNA, 122 bp, Homo sapiens
  misc_feature (61)..(62): /note="This region represents a CpG dinucleotide"
  misc_feature (61)..(61): /note="Nucleotide may be methylated to form 5-methylcytosine"
tgtattaactcaattattcctcacaataaacctagcctctgtattttacaattagagaaacggaaccattgaggattacaataactcatccaaggccacacagttagtgaggggcagagcca

SEQ ID NO: 491 - DNA, 122 bp, Homo sapiens
  misc_feature (61)..(62): /note="This region represents a CpG dinucleotide"
  misc_feature (61)..(61): /note="Nucleotide may be methylated to form 5-methylcytosine"
cgggctcaggcggggagagggtgcggggccgcagcgagctgcgggcggaggtgcgggctccgcggagcccggccaggctcggttccgcgttcctgggcccgcgggtaagctgagtcggcggg

SEQ ID NO: 492 - DNA, 122 bp, Homo sapiens
  misc_feature (61)..(62): /note="This region represents a CpG dinucleotide"
  misc_feature (61)..(61): /note="Nucleotide may be methylated to form 5-methylcytosine"
tgggaggcagaggttgcagtgagccaagataccaccactgcactctagcctgggagaccgcgagactctgtctccaaataaataaataaataaaaacattagtgactgtcaaaaaaaaaaag

SEQ ID NO: 493 - DNA, 122 bp, Homo sapiens
  misc_feature (61)..(62): /note="This region represents a CpG dinucleotide"
  misc_feature (61)..(61): /note="Nucleotide may be methylated to form 5-methylcytosine"
gggtgatagcggctgcggcgcctgcagtccagatcctcgcagttctgcgggcgaaggaggcgaacggaatcggcccccagtggggagcgcaacaagccacagtagccaaaccccgcgctcct

SEQ ID NO: 494 - DNA, 122 bp, Homo sapiens
  misc_feature (61)..(62): /note="This region represents a CpG dinucleotide"
  misc_feature (61)..(61): /note="Nucleotide may be methylated to form 5-methylcytosine"
tggcatattgttagaattgtgctattttttttgagtctcgctctgttgcccaggctgaaccgcagtggcgcgatcttggctcactgcaagtgattctcctgcctcagcctctcgactagctg

SEQ ID NO: 495 - DNA, 122 bp, Homo sapiens
  misc_feature (61)..(62): /note="This region represents a CpG dinucleotide"
  misc_feature (61)..(61): /note="Nucleotide may be methylated to form 5-methylcytosine"
aaattctactgacacttattcttaatttttttaagagacagctgtaacattgtttacaaacgtataaataccatcccagcgagaaactagctttgtgcttctgtcataaaagagacacaggt

SEQ ID NO: 496 - DNA, 122 bp, Homo sapiens
  misc_feature (61)..(62): /note="This region represents a CpG dinucleotide"
  misc_feature (61)..(61): /note="Nucleotide may be methylated to form 5-methylcytosine"
cccccccccgctccacgccgtgtgtgggcgggggtcaggaggtgcggggcggaggcggagcgtgggccgcggagatccggcgttcgcaggaggcttggtgcgcggcggggctgcacggggcc

SEQ ID NO: 497 - DNA, 122 bp, Homo sapiens
  misc_feature (61)..(62): /note="This region represents a CpG dinucleotide"
  misc_feature (61)..(61): /note="Nucleotide may be methylated to form 5-methylcytosine"
aagcgcgtggagagccgaaaggtgcggtgggcgcagagggcgggctggctgcggggcgaccgcgcgccggggccatgccgcgctccttcctggtggactcgctagtgctgcgcgaggcgggc

SEQ ID NO: 498 - DNA, 122 bp, Homo sapiens
  misc_feature (61)..(62): /note="This region represents a CpG dinucleotide"
  misc_feature (61)..(61): /note="Nucleotide may be methylated to form 5-methylcytosine"
tttagaatgaccttgaaatgccttctagctgagcagtcagttgtaacacattcccagtcacgcctcccacacttctttcctgacagtatgtcatgaaaccctactgcatggaatcctgcctc

SEQ ID NO: 499 - DNA, 122 bp, Homo sapiens
  misc_feature (61)..(62): /note="This region represents a CpG dinucleotide"
  misc_feature (61)..(61): /note="Nucleotide may be methylated to form 5-methylcytosine"
gctggcgcagcagaatccagacctgcacaacgccgagttgagcaagatgctgggtgagtccgagtcgcagacccaggcggccgggcgcgctggcgcgaatcgctaggccgatttcttaaacc

SEQ ID NO: 500 - DNA, 122 bp, Homo sapiens
  misc_feature (61)..(62): /note="This region represents a CpG dinucleotide"
  misc_feature (61)..(61): /note="Nucleotide may be methylated to form 5-methylcytosine"
gggcgaatccgccaaatgtgcgagctgggcagcccacccctttcagctgctggccggaagcggaagtgggcgtccgtcgcctcgccatctcccatagctgtcgcctgcagctgagaaagggt

SEQ ID NO: 501 - DNA, 122 bp, Homo sapiens
  misc_feature (61)..(62): /note="This region represents a CpG dinucleotide"
  misc_feature (61)..(61): /note="Nucleotide may be methylated to form 5-methylcytosine"
ttcttttttacctttccactgtcatatgccatgggtcctgaacatagctcattgcttgaccggaataatgtctcttgccagcttataatcaaagggactactgagaaaaacagctgagctgt

SEQ ID NO: 502 - DNA, 122 bp, Homo sapiens
  misc_feature (61)..(62): /note="This region represents a CpG dinucleotide"
  misc_feature (61)..(61): /note="Nucleotide may be methylated to form 5-methylcytosine"
aatacatgggactgctatgaagcaggaaaagtttcccttaggaaaaaactatgcctttaacggtgtgacctagttgaagagctccagacataaaaattcagccttcccaaagcatgaagctt

SEQ ID NO: 503 - DNA, 122 bp, Homo sapiens
  misc_feature (61)..(62): /note="This region represents a CpG dinucleotide"
  misc_feature (61)..(61): /note="Nucleotide may be methylated to form 5-methylcytosine"
aagaaaaggctaaaaacaagacacacagaacaagaaattgcactctctcaaaacgacagtcgccctgaaacggacgctggaagaggtttccaggcccgtggcgacggtgaggggggtgaagg

SEQ ID NO: 504 - DNA, 122 bp, Homo sapiens
  misc_feature (61)..(62): /note="This region represents a CpG dinucleotide"
  misc_feature (61)..(61): /note="Nucleotide may be methylated to form 5-methylcytosine"
caggctggagtgcagaggtgtgatctcagctcactaaaacttccaccttccggtttcaagcgattctcctgcctcaggctcctgagtagctgggattacaggcgcccgccaccacgcccaac

SEQ ID NO: 505 - DNA, 122 bp, Homo sapiens
  misc_feature (61)..(62): /note="This region represents a CpG dinucleotide"
  misc_feature (61)..(61): /note="Nucleotide may be methylated to form 5-methylcytosine"
tttttgagacgaagtcttgcttcgtcgcccagggtggagtgtagtgttgtgatcacagctcgctgtggcctcaacctcctgggttcaagtgatcctcccacctcagcctctcaagtagcttg

SEQ ID NO: 506 - DNA, 122 bp, Homo sapiens
  misc_feature (61)..(62): /note="This region represents a CpG dinucleotide"
  misc_feature (61)..(61): /note="Nucleotide may be methylated to form 5-methylcytosine"
agatgggtggcatcggaaaatcaagactgtctttactactctcttcagtgtctctttcagcgatatgaagttaaaaaaccaagtactgtgatcactcacctgagttttggtttttagaaggt

SEQ ID NO: 507 - DNA, 122 bp, Homo sapiens
  misc_feature (61)..(62): /note="This region represents a CpG dinucleotide"
  misc_feature (61)..(61): /note="Nucleotide may be methylated to form 5-methylcytosine"
ccaaggctgggggtcccgggttcggaggaggcggccaaggtgcaggccgaggctggcgagcggcttagggacgtggctcgcccgccaggaccagagcgcgcggaggggcttcggggaagttt

SEQ ID NO: 508 - DNA, 122 bp, Homo sapiens
  misc_feature (61)..(62): /note="This region represents a CpG dinucleotide"
  misc_feature (61)..(61): /note="Nucleotide may be methylated to form 5-methylcytosine"
atggaactagggtcattatgttaagtgaaataagccaggcacaaaaagacaaatattacacgttctcactcatatgtgagagctgaaaatgtggatctcctggagatagagagtagaacggt

SEQ ID NO: 509 - DNA, 122 bp, Homo sapiens
  misc_feature (61)..(62): /note="This region represents a CpG dinucleotide"
  misc_feature (61)..(61): /note="Nucleotide may be methylated to form 5-methylcytosine"
actacaggcacaggccaccacacctgaataatttttgcattttttgtagagacaggctttcgccatgttgtccaggctggtctccaactcctgggctcaagtgatctgcctgtgttggcctc

SEQ ID NO: 510 - DNA, 122 bp, Homo sapiens
  misc_feature (61)..(62): /note="This region represents a CpG dinucleotide"
  misc_feature (61)..(61): /note="Nucleotide may be methylated to form 5-methylcytosine"
tagtatgtatggatggggcgtttgtctctaactatattccgtgtaacgcaggcttgtggtcgcttcataaacaacaacgcggttaccaagatggcccaatcatccagtaaatcccctgagtt

SEQ ID NO: 511 - DNA, 122 bp, Homo sapiens
  misc_feature (61)..(62): /note="This region represents a CpG dinucleotide"
  misc_feature (61)..(61): /note="Nucleotide may be methylated to form 5-methylcytosine"
tcggcggcaccccccacccatccccttcgcccctcctccgctccctctgtgctcccgaggcgcagtgcgctccggcctttgaccttctcaggctccgctgggccccgcaccgctggcccggt

SEQ ID NO: 512 - DNA, 122 bp, Homo sapiens
  misc_feature (61)..(62): /note="This region represents a CpG dinucleotide"
  misc_feature (61)..(61): /note="Nucleotide may be methylated to form 5-methylcytosine"
gtaatttttgttagaacacgtctaatgtggtacttctcagcctggagtgagttttctccccgggggacatttggtaacatctggagatatttttggttgtctcaaatggtggtggtgggggg

SEQ ID NO: 513 - DNA, 122 bp, Homo sapiens
  misc_feature (61)..(62): /note="This region represents a CpG dinucleotide"
  misc_feature (61)..(61): /note="Nucleotide may be methylated to form 5-methylcytosine"
aagtggtttaaatccaggtttgaatgagttaaatgtacgcgccttctccctgacatcatacggcctttctgactaatgggcccctttccactctctctcaaatcaggaacagaacctttttt

SEQ ID NO: 514 - DNA, 122 bp, Homo sapiens
  misc_feature (61)..(62): /note="This region represents a CpG dinucleotide"
  misc_feature (61)..(61): /note="Nucleotide may be methylated to form 5-methylcytosine"
gaaataaacttttagtaaatgtaagcctttctggaacttcttgtctgctatcaagtgccccgagggatgaggtgatgtgtttgtaaggaaggggctaacggcagagtccccaagagctgtct

SEQ ID NO: 515 - DNA, 122 bp, Homo sapiens
  misc_feature (61)..(62): /note="This region represents a CpG dinucleotide"
  misc_feature (61)..(61): /note="Nucleotide may be methylated to form 5-methylcytosine"
cggctcctcctcagacacgatgaagccgccattgttgccagggtttccttccagacttcacggagttgggtttcacttaggagacaaattatataactagagacacaaaaattcatgctcac

SEQ ID NO: 516 - DNA, 122 bp, Homo sapiens
  misc_feature (61)..(62): /note="This region represents a CpG dinucleotide"
  misc_feature (61)..(61): /note="Nucleotide may be methylated to form 5-methylcytosine"
ggcatggggggagtagggaggagccagctgggttcccagacttccagagcagcacagaggcggagagggatttttttgcgggtgtgataatgagttccattcaggacaaactgtatttgtga

SEQ ID NO: 517 - DNA, 122 bp, Homo sapiens
  misc_feature (61)..(62): /note="This region represents a CpG dinucleotide"
  misc_feature (61)..(61): /note="Nucleotide may be methylated to form 5-methylcytosine"
agttctaagtgtactgttcagtagcactaggtacattcacagttttataaccatcaccaccgtttatctccagaactgtttcttctcaaactgaattctgttcccattaaacagtccccatt

SEQ ID NO: 518 - DNA, 122 bp, Homo sapiens
  misc_feature (61)..(62): /note="This region represents a CpG dinucleotide"
  misc_feature (61)..(61): /note="Nucleotide may be methylated to form 5-methylcytosine"
caacatatttagataatcagcctctagtctgcctcacttctgtcgaaacaagagtggatgcgaatctaaagatttttaacgtcatctaaaattgagaaatattgactcaagatgaacttata

SEQ ID NO: 519 - DNA, 122 bp, Homo sapiens
  misc_feature (61)..(62): /note="This region represents a CpG dinucleotide"
  misc_feature (61)..(61): /note="Nucleotide may be methylated to form 5-methylcytosine"
ggcgccgctgtgcggggcgctgagcctgctgctgggcgcgctgctgggcaaaggtaaggccggggcgggtgcctggcgcgccgacgcatgcgaacttcccggttccgggggagctcggggtg

SEQ ID NO: 520 - DNA, 122 bp, Homo sapiens
  misc_feature (61)..(62): /note="This region represents a CpG dinucleotide"
  misc_feature (61)..(61): /note="Nucleotide may be methylated to form 5-methylcytosine"
cagagaggaggagtaactgatattccacggctaaggtggcacagagctagggttcaaacccgtgtcattgactctaggtctgtgtgcataactgctaggccatgctgcctctggaaaaaaat

SEQ ID NO: 521 - DNA, 122 bp, Homo sapiens
  misc_feature (61)..(62): /note="This region represents a CpG dinucleotide"
  misc_feature (61)..(61): /note="Nucleotide may be methylated to form 5-methylcytosine"
ggtccctggacaggtccggttgctggtcccgtgcccatgctgctaggggagcatggggtgcgctccgcctccagccaacgtctccgcatcggtgcccttgccatcgccgggggatagagcag

SEQ ID NO: 522 - DNA, 122 bp, Homo sapiens
  misc_feature (61)..(62): /note="This region represents a CpG dinucleotide"
  misc_feature (61)..(61): /note="Nucleotide may be methylated to form 5-methylcytosine"
cagctcttaaaggcagcgcagacccaaagagtgaatagcagcaagatttatttcgaagagcgaaagaacaaagctttcacagcatggaagaggacccgagcgggttgccactgctggctcag

SEQ ID NO: 523 - DNA, 122 bp, Homo sapiens
  misc_feature (61)..(62): /note="This region represents a CpG dinucleotide"
  misc_feature (61)..(61): /note="Nucleotide may be methylated to form 5-methylcytosine"
agcgccactccaccgtcgagatcacagcttcaaacctcaactccttggagccttcgaaggcgcagttctgactactgagtatttcctggaaagaaaaagaagcccaaagcggtgaaatgatg

SEQ ID NO: 524 - DNA, 122 bp, Homo sapiens
  misc_feature (61)..(62): /note="This region represents a CpG dinucleotide"
  misc_feature (61)..(61): /note="Nucleotide may be methylated to form 5-methylcytosine"
ctctcgcccgccgctctccgcgcctcagcagcctagggaacagcagcgcgggccctgggccggctggtccagccacaccgcctgtctccgctcgctgagccgctgcttcatcgcactgcagc

SEQ ID NO: 525 - DNA, 122 bp, Homo sapiens
  misc_feature (61)..(62): /note="This region represents a CpG dinucleotide"
  misc_feature (61)..(61): /note="Nucleotide may be methylated to form 5-methylcytosine"
ccagaaatctgtaaccagtatcaggaattctccagctttgtatacatagccactcatgatcggattctactccttgcttttatcttgcttgttgtctttggggttttgaagatttgaaggaa

SEQ ID NO: 526 - DNA, 122 bp, Homo sapiens
  misc_feature (61)..(62): /note="This region represents a CpG dinucleotide"
  misc_feature (61)..(61): /note="Nucleotide may be methylated to form 5-methylcytosine"
tcagatatattaatctttaaaaatatcttccaggattctttaaattcaggtttttctttccgctagatattcttctagattttttctaaaattcttattttaattattatatttaagtcttt

SEQ ID NO: 527 - DNA, 122 bp, Homo sapiens
  misc_feature (61)..(62): /note="This region represents a CpG dinucleotide"
  misc_feature (61)..(61): /note="Nucleotide may be methylated to form 5-methylcytosine"
gggcgccccgggaggagtttccggcgcggggcggggtcgggggcggggtcgggggcggggcggggcggcgggtgggccccaccccccagctgagcccggccgggcggactcggactcgccaa

SEQ ID NO: 528 - DNA, 122 bp, Homo sapiens
  misc_feature (61)..(62): /note="This region represents a CpG dinucleotide"
  misc_feature (61)..(61): /note="Nucleotide may be methylated to form 5-methylcytosine"
atcatttaaaaactaaaaaagaaaaacaattttttttcaagggcctgagaaaggaaaaagcgaagtcaaaagaattacagttgaccattgaataatgcaggagataggggcgccaacccccc

SEQ ID NO: 529 - DNA, 122 bp, Homo sapiens
  misc_feature (61)..(62): /note="This region represents a CpG dinucleotide"
  misc_feature (61)..(61): /note="Nucleotide may be methylated to form 5-methylcytosine"
agacacccgggcgcggcgcggggccctgatggatgcggtgaccgaggctgtggctgcgggcgcggcgtctccgcggcagtcgctgcctccgcggccccctccccagccccagccccagcccc

SEQ ID NO: 530 - DNA, 122 bp, Homo sapiens
  misc_feature (61)..(62): /note="This region represents a CpG dinucleotide"
  misc_feature (61)..(61): /note="Nucleotide may be methylated to form 5-methylcytosine"
gttgtgcgcagggaggaggcgtgtgcccggcctggcgagtttcattgagcggaattagcccggatgacatcagcttcccagccccccggcgggcccagctcattggcgaggcagcccctcca

SEQ ID NO: 531 - DNA, 122 bp, Homo sapiens
  misc_feature (61)..(62): /note="This region represents a CpG dinucleotide"
  misc_feature (61)..(61): /note="Nucleotide may be methylated to form 5-methylcytosine"
ggcccgcggggccctagccgaggccgtagtaggtggaatacggggcagccacggaggaatcgggggcgaggcgcggagaggccccggatgcagcggtcccgccccgagaacggagcgcgcgg

SEQ ID NO: 532 - DNA, 122 bp, Homo sapiens
  misc_feature (61)..(62): /note="This region represents a CpG dinucleotide"
  misc_feature (61)..(61): /note="Nucleotide may be methylated to form 5-methylcytosine"
ccaccactgaaacaccctcggcttctgcaaaaagatgtgctttaaagagaatagaatggacgctcggtatgttcatctaaacgaccttgggcaagtacgtcgattccaaggtacaatcagcc

SEQ ID NO: 533 - DNA, 122 bp, Homo sapiens
  misc_feature (61)..(62): /note="This region represents a CpG dinucleotide"
  misc_feature (61)..(61): /note="Nucleotide may be methylated to form 5-methylcytosine"
tttaagagctcatcctgcatttttaaaatctctccaactggatcaaattttttatatactcgtttgataggtttttttaaaacacatgactcttcaggactacaagcagtattagtctggtt

SEQ ID NO: 534 - DNA, 122 bp, Homo sapiens
  misc_feature (61)..(62): /note="This region represents a CpG dinucleotide"
  misc_feature (61)..(61): /note="Nucleotide may be methylated to form 5-methylcytosine"
tcttgttctcactctgatcactgtgctgcttcttgtggcatctcagagagtcatccctgacgaaggaggcgccgcaggtctcacagcggaaggccctctgcgtcacgatcttggccacgtgc

SEQ ID NO: 535 - DNA, 122 bp, Homo sapiens
  misc_feature (61)..(62): /note="This region represents a CpG dinucleotide"
  misc_feature (61)..(61): /note="Nucleotide may be methylated to form 5-methylcytosine"
tcgtagtccacgggcccggccagggtgaggcggcctgatcgcgggtcaagccgaaagaggcggcgcgcctccggcggggtgcgggcgccaaatgcgaacaccacgtcgccgttaggtccctc

SEQ ID NO: 536 - DNA, 122 bp, Homo sapiens
  misc_feature (61)..(62): /note="This region represents a CpG dinucleotide"
  misc_feature (61)..(61): /note="Nucleotide may be methylated to form 5-methylcytosine"
gggccggggccggggagagggcgcagcgaggtgggggccagtccagaccgacggcagcgacggagcgggcggcggcggcggcgccggcggcggcggggtggctcagtccccagtctcagacg

SEQ ID NO: 537 - DNA, 122 bp, Homo sapiens
  misc_feature (61)..(62): /note="This region represents a CpG dinucleotide"
  misc_feature (61)..(61): /note="Nucleotide may be methylated to form 5-methylcytosine"
tttgttttctgattcacatttcccttttaaatcaagtgcctagaacaatgtctgacacatcgtggttgatatatatttgctgaatagatgaaatttttgttgtgtctcctactgaacatttt

SEQ ID NO: 538 - DNA, 122 bp, Homo sapiens
  misc_feature (61)..(62): /note="This region represents a CpG dinucleotide"
  misc_feature (61)..(61): /note="Nucleotide may be methylated to form 5-methylcytosine"
agcagggagctgggcggggagcggggcggggagctgggctgggctcggcacggggcggggcggagggtggggagcggaaagcaggacgcacggctcccgcggcccgctggctgcccttcccg

SEQ ID NO: 539 - DNA, 122 bp, Homo sapiens
  misc_feature (61)..(62): /note="This region represents a CpG dinucleotide"
  misc_feature (61)..(61): /note="Nucleotide may be methylated to form 5-methylcytosine"
tggggcagcggcgttgcaggagatgagctcagcgcaaagggaaccccgcagcggcgagtgcggctgctggcctgcgcgctgtggccccaacaggctggcagggcgcgggcgggtggcggggt

SEQ ID NO: 540 - DNA, 122 bp, Homo sapiens
  misc_feature (61)..(62): /note="This region represents a CpG dinucleotide"
  misc_feature (61)..(61): /note="Nucleotide may be methylated to form 5-methylcytosine"
caacacgaaagcccgtgtggtcgcgccgggagctcacggcgttccaagcggcacttatcccgcgttgatgcccaggcaccccgcgcgccctgtttcaccaggcccagtcactccagctccag

SEQ ID NO: 541 - DNA, 122 bp, Homo sapiens
  misc_feature (61)..(62): /note="This region represents a CpG dinucleotide"
  misc_feature (61)..(61): /note="Nucleotide may be methylated to form 5-methylcytosine"
gaggctggtcgcggaagactgacggtggggctagtgaggctgctgtattttggctgccgccgccgctgctgccactgggcagataccgcagtgaggggtctgaccgcgctgagtgctctcgg

SEQ ID NO: 542 - DNA, 122 bp, Homo sapiens
  misc_feature (61)..(62): /note="This region represents a CpG dinucleotide"
  misc_feature (61)..(61): /note="Nucleotide may be methylated to form 5-methylcytosine"
tctgaagacagtgctctccctgccccgctacccaggggagttcctgcaccccgtggtgtacgcgtgcacggccgtcatgctgctctgcctcctggcctccttcgtcacctacatcgtgcacc

SEQ ID NO: 543 - DNA, 122 bp, Homo sapiens
  misc_feature (61)..(62): /note="This region represents a CpG dinucleotide"
  misc_feature (61)..(61): /note="Nucleotide may be methylated to form 5-methylcytosine"
taggaattaaaaaggttacttaatacagcatattaacactcccccccacccacccacccccgcaagaaaagaacacatgagggttagctcctttagtaatcaaaccaccttccctattcctc

SEQ ID NO: 544 - DNA, 122 bp, Homo sapiens
  misc_feature (61)..(62): /note="This region represents a CpG dinucleotide"
  misc_feature (61)..(61): /note="Nucleotide may be methylated to form 5-methylcytosine"
tatacaccaacagcaaccaagctgagaatcaaacaaagaactcaattcctttgacaatagcggcaaaagtattttgttttattagaaaaataaaatacttaggaacatacctaacaaagaag

SEQ ID NO: 545 - DNA, 122 bp, Homo sapiens
  misc_feature (61)..(62): /note="This region represents a CpG dinucleotide"
  misc_feature (61)..(61): /note="Nucleotide may be methylated to form 5-methylcytosine"
gggaagggctgtctacagaatattatggttttcaggtttcaaagacttcaacactatctccgatgaccagattattcaaaaagttagcaataaaaagggtgctaagcaaactcattcattca

SEQ ID NO: 546 - DNA, 122 bp, Homo sapiens
  misc_feature (61)..(62): /note="This region represents a CpG dinucleotide"
  misc_feature (61)..(61): /note="Nucleotide may be methylated to form 5-methylcytosine"
agtttgcatagattgatactagttctttataaaatgtttggtagaattcagcaatgaaaccgtcaggtcctgggcttttctttgatgggatactttttaatactgcttctatctcatttgtt

SEQ ID NO: 547 - DNA, 122 bp, Homo sapiens
  misc_feature (61)..(62): /note="This region represents a CpG dinucleotide"
  misc_feature (61)..(61): /note="Nucleotide may be methylated to form 5-methylcytosine"
tcgaattcctactatgtaccaataataattctattttaaaaataaaaaaacaggctaagacgggcttaatagccaactcaaagccacatggtcaataaggaggaaagctgagagtcagtcat

SEQ ID NO: 548 - DNA, 122 bp, Homo sapiens
  misc_feature (61)..(62): /note="This region represents a CpG dinucleotide"
  misc_feature (61)..(61): /note="Nucleotide may be methylated to form 5-methylcytosine"
cggttccgccgcgtttgtgggctggtagcccggaatacatttcccagaggccttcgcggccgacgtgcttcgcgcaggaacgcagccgcctcccgactggaggacgcggtagcggagctgct

SEQ ID NO: 549 - DNA, 122 bp, Homo sapiens
  misc_feature (61)..(62): /note="This region represents a CpG dinucleotide"
  misc_feature (61)..(61): /note="Nucleotide may be methylated to form 5-methylcytosine"
agactttgttgtgcacaagggtattgtcattcaattctgtaggcagtcaagaatcagagtcggtgcttttagaatccaagtacataggcttaagctctggtccctcccgttattgattctgc

SEQ ID NO: 550 - DNA, 122 bp, Homo sapiens
  misc_feature (61)..(62): /note="This region represents a CpG dinucleotide"
  misc_feature (61)..(61): /note="Nucleotide may be methylated to form 5-methylcytosine"
atagagtttccttatttttaggggtctggatatcataatcctaactccattctacataatcgaggtcagtctcctttgtagtctctaggaagtgcagatggctccaatgatacaacctgaga

SEQ ID NO: 551 - DNA, 122 bp, Homo sapiens
  misc_feature (61)..(62): /note="This region represents a CpG dinucleotide"
  misc_feature (61)..(61): /note="Nucleotide may be methylated to form 5-methylcytosine"
taagcggcctcaccaactcggttgcgcaaaccgcgctcctggctgagcggccgctgtgcgcgccccgcctgctggaccacttcatctgtgagctgccggcgttgctcaagctggcctgcgga

SEQ ID NO: 552 - DNA, 122 bp, Homo sapiens
  misc_feature (61)..(62): /note="This region represents a CpG dinucleotide"
  misc_feature (61)..(61): /note="Nucleotide may be methylated to form 5-methylcytosine"
gctgatgtataaaaccccaagtcaaagatcaaacagggtacttggatctctcaagttgtccgcttggcacttttccaagtgtactttacttccttttgttcttgctctaaaactttttaata

SEQ ID NO: 553 - DNA, 122 bp, Homo sapiens
  misc_feature (61)..(62): /note="This region represents a CpG dinucleotide"
  misc_feature (61)..(61): /note="Nucleotide may be methylated to form 5-methylcytosine"
cgctccctcgcgcaccagattatttttggctccgcagccggggctgctcgctgcttgtcgcgcgctcacacacacacagacacacacgcacacacacacatgcacacattttctcgcgctct

SEQ ID NO: 554 - DNA, 122 bp, Homo sapiens
  misc_feature (61)..(62): /note="This region represents a CpG dinucleotide"
  misc_feature (61)..(61): /note="Nucleotide may be methylated to form 5-methylcytosine"
ccgcctcccaggttcaagaaattctcttgcctcagccttctaagtagccaggcctacaggcgcgtgccaccacacccaactaatttttgtacttgtagtagagacagggtttcaccatgttg

SEQ ID NO: 555 - DNA, 122 bp, Homo sapiens
  misc_feature (61)..(62): /note="This region represents a CpG dinucleotide"
  misc_feature (61)..(61): /note="Nucleotide may be methylated to form 5-methylcytosine"
tataaccctttcacaacttgttcaaacctttagacttttcctatctcatttaaaacagtccgttaacactctaaacttaggcaagaaatccacattcccatgccttctcataatcttttacc

SEQ ID NO: 556 - DNA, 122 bp, Homo sapiens
  misc_feature (61)..(62): /note="This region represents a CpG dinucleotide"
  misc_feature (61)..(61): /note="Nucleotide may be methylated to form 5-methylcytosine"
tgggcagggggtggcggcggcgacggtggcggagccgcagagcgagctagagagcgagagcggtgagactctgcggacgtcttcccgcccgccgcgctccgccccacccagcctccgcagcc

SEQ ID NO: 557 - DNA, 122 bp, Homo sapiens
  misc_feature (61)..(62): /note="This region represents a CpG dinucleotide"
  misc_feature (61)..(61): /note="Nucleotide may be methylated to form 5-methylcytosine"
tcccgcgcccttctccgcgcctcggggccccggaacacccccatgtcatatgcccgacaccggctccaaatctccttgtgatgtcgcagcagtcctaggcctcctcgtgtcccgcccgctct

SEQ ID NO: 558 - DNA, 122 bp, Homo sapiens
  misc_feature (61)..(62): /note="This region represents a CpG dinucleotide"
  misc_feature (61)..(61): /note="Nucleotide may be methylated to form 5-methylcytosine"
ctggccttaagcaatcttccggccttggccttccaaaatgttgggactacaggcctgagccgctgcatccagcacttttattatttttaaatggttgaaacacatcaagagaggaataatat

SEQ ID NO: 559 - DNA, 122 bp, Homo sapiens
  misc_feature (61)..(62): /note="This region represents a CpG dinucleotide"
  misc_feature (61)..(61): /note="Nucleotide may be methylated to form 5-methylcytosine"
aactgagcggcgggatctgcggccgcccggggccctcggccaacatcccagcatcctctgcgccgcgccggccccggactccatttcccagcggcccctgcggcctgccctagggctgcggc

SEQ ID NO: 560 - DNA, 122 bp, Homo sapiens
  misc_feature (61)..(62): /note="This region represents a CpG dinucleotide"
  misc_feature (61)..(61): /note="Nucleotide may be methylated to form 5-methylcytosine"
acctccctcccgctgtgcaaaggaacgcaggagcccggcgcaggtggtgggcttaccgcgcgcacgcctggctggagaggtgacgccgctgtctgccaacctttcccagcttttcccacgat

SEQ ID NO: 561 - DNA, 122 bp, Homo sapiens
  misc_feature (61)..(62): /note="This region represents a CpG dinucleotide"
  misc_feature (61)..(61): /note="Nucleotide may be methylated to form 5-methylcytosine"
ttgctcaagctggcctgcggaggcgacggagacactaccgagaaccagatgttcgccgcccgcgtggtcatcctgctgctgccgtttgccgtcatcctggcctcctacggtgccgtggcccg

SEQ ID NO: 562 - DNA, 122 bp, Homo sapiens
  misc_feature (61)..(62): /note="This region represents a CpG dinucleotide"
  misc_feature (61)..(61): /note="Nucleotide may be methylated to form 5-methylcytosine"
ggacgcgtgcttcgagcctgcctgggcgcagaacggggtccctcggcaggaccctcgccgcgacagcctcagcaggggatcgtcgagcaaaagcccgcaggaatgctcctttctggggcccc

SEQ ID NO: 563 - DNA, 122 bp, Homo sapiens
  misc_feature (61)..(62): /note="This region represents a CpG dinucleotide"
  misc_feature (61)..(61): /note="Nucleotide may be methylated to form 5-methylcytosine"
gcgcatcgggcccgcctggttcttaggaactacgactcccagggggcgctgcgcgctcgccggcaccgcgactaaagcttgcaaagcctgggtcatcgaaactacaactcccagaaggctaa

SEQ ID NO: 564 - DNA, 122 bp, Homo sapiens
  misc_feature (61)..(62): /note="This region represents a CpG dinucleotide"
  misc_feature (61)..(61): /note="Nucleotide may be methylated to form 5-methylcytosine"
ggagtctgtatgttctccccatgtctctgggtttcttctgggtgctctggtttcctcccacgtccccaaggtgtgtgtgtcaggtgcactggcgtgtctatgcggtcccagtctgagtgagt

SEQ ID NO: 565 - DNA, 122 bp, Homo sapiens
  misc_feature (61)..(62): /note="This region represents a CpG dinucleotide"
  misc_feature (61)..(61): /note="Nucleotide may be methylated to form 5-methylcytosine"
aatatcagagacaggtctcagttaatccagaaagtttattttgccaagattgaggatgtgcgcctctgatacagcctcagtacgtcctgacaacatgtgcccaaggaggctggtgcacagct

SEQ ID NO: 566 - DNA, 122 bp, Homo sapiens
  misc_feature (61)..(62): /note="This region represents a CpG dinucleotide"
  misc_feature (61)..(61): /note="Nucleotide may be methylated to form 5-methylcytosine"
ctatgtgtggttctttctgatgattcacctttgactattactcaaggcttacaagggggtcgcatcaccttccaggctgttgtttgcttctgaacatggcttcgtgtgtgacaggagagagg

SEQ ID NO: 567 - DNA, 122 bp, Homo sapiens
  misc_feature (61)..(62): /note="This region represents a CpG dinucleotide"
  misc_feature (61)..(61): /note="Nucleotide may be methylated to form 5-methylcytosine"
gctgatggaccagctccagggagtggtcagcaacttcagtaccgcgatcccggattttcacgcggtgctggcaggccccggtggtcccgggaacgggctgcggtccctgtacccgcccccgc

SEQ ID NO: 568 - DNA, 122 bp, Homo sapiens
  misc_feature (61)..(62): /note="This region represents a CpG dinucleotide"
  misc_feature (61)..(61): /note="Nucleotide may be methylated to form 5-methylcytosine"
attagagctaaaggggtgagacagaccataatgcaacaacagctgaagacttcaacaccccgccttcaggattggacagatcttccaaacagaaaatcagtcaacaaagaaacatcatactc

SEQ ID NO: 569 - DNA, 122 bp, Homo sapiens
  misc_feature (61)..(62): /note="This region represents a CpG dinucleotide"
  misc_feature (61)..(61): /note="Nucleotide may be methylated to form 5-methylcytosine"
gaaataatgggagaagaggatcgattgctccatcagcctaagatgtcactgtcgctctggcgtctgctcctgggccctgtgtgctctgcagaccctagagagaccatttcttttcacttcgt

SEQ ID NO: 570 - DNA, 122 bp, Homo sapiens
  misc_feature (61)..(62): /note="This region represents a CpG dinucleotide"
  misc_feature (61)..(61): /note="Nucleotide may be methylated to form 5-methylcytosine"
tccacgccaatgagaatgtgagggcggggcctgaatagacgcaggaaatggcgacggccgcgggtctgtgagcagcgggggcggggcctggttgtggcccctccttctcccgtccccaagtt

SEQ ID NO: 571 - DNA, 122 bp, Homo sapiens
  misc_feature (61)..(62): /note="This region represents a CpG dinucleotide"
  misc_feature (61)..(61): /note="Nucleotide may be methylated to form 5-methylcytosine"
tgcgacgcatgcgttcagcctccaagaaagtggcaaatacggctgcgcgaattggcggcccggccctccttggtcacgtgttgggagacagcggcgtggcggcggcggtggcggtagcgacg

SEQ ID NO: 572 - DNA, 122 bp, Homo sapiens
  misc_feature (61)..(62): /note="This region represents a CpG dinucleotide"
  misc_feature (61)..(61): /note="Nucleotide may be methylated to form 5-methylcytosine"
tctattcttttcttttttttttttttttttttttttttttttttgagatggagtcttgctcgtgtcttgcttttggtgcttagggactctcacagccagattggtagcaagggatactgacc

SEQ ID NO: 573 - DNA, 122 bp, Homo sapiens
  misc_feature (61)..(62): /note="This region represents a CpG dinucleotide"
  misc_feature (61)..(61): /note="Nucleotide may be methylated to form 5-methylcytosine"
gaaactcggctgggggtgggggctcagaagccgccccagaaagcactgaaagccacagcacgtacacccactccagggatctgccagcaccctgtggggcccagactacaggctgatggcgg

SEQ ID NO: 574 - DNA, 122 bp, Homo sapiens
  misc_feature (61)..(62): /note="This region represents a CpG dinucleotide"
  misc_feature (61)..(61): /note="Nucleotide may be methylated to form 5-methylcytosine"
aaagccctggcaggtaaagagaggacccgcgcaggctgggagctcccactcctcctccagcgtcacgctcgccctccgccgctgcctcgcgtccgggtctgtttatatagcgtctggaggcc

SEQ ID NO: 575 - DNA, 122 bp, Homo sapiens
  misc_feature (61)..(62): /note="This region represents a CpG dinucleotide"
  misc_feature (61)..(61): /note="Nucleotide may be methylated to form 5-methylcytosine"
gaatactagcaatatgttaaccctacattttcttcctgtgggtaaaattcacagtatctgcgtcaatgaaatgctttacttcttttcatggatgagaaaacaatctagtatttaaaagcaga

SEQ ID NO: 576 - DNA, 122 bp, Homo sapiens
  misc_feature (61)..(62): /note="This region represents a CpG dinucleotide"
  misc_feature (61)..(61): /note="Nucleotide may be methylated to form 5-methylcytosine"
aagaaagttacatattgattgctgttgctcgcggcatgttcgtaccagcgcgggcagaaacgggctcacgagcgccctcgaattcacacacactcaccgaaatacacatctcagcccgtgga

SEQ ID NO: 577 - DNA, 122 bp, Homo sapiens
  misc_feature (61)..(62): /note="This region represents a CpG dinucleotide"
  misc_feature (61)..(61): /note="Nucleotide may be methylated to form 5-methylcytosine"
cgagagggcccggtccagcagcctctggggcccagtgcgcagggcactgcgggccgattgcgccccggggccaggaggcgccgagaaagcaaaagcaaaagccggcggcgggtggaggtcaa

SEQ ID NO: 578 - DNA, 122 bp, Homo sapiens
  misc_feature (61)..(62): /note="This region represents a CpG dinucleotide"
  misc_feature (61)..(61): /note="Nucleotide may be methylated to form 5-methylcytosine"
ttcaacaatcattttaatatatagtcaatggctctttgtggaagggacaaaaagaaactacgcgcagttgttgaatagactttgcgctaggcaaagacaggttaatcgagggccgcatcgcg

SEQ ID NO: 579 - DNA, 122 bp, Homo sapiens
  misc_feature (61)..(62): /note="This region represents a CpG dinucleotide"
  misc_feature (61)..(61): /note="Nucleotide may be methylated to form 5-methylcytosine"
cgccgccgggggcggggccgcgggccgggcgcggagggcgcgcccagggtgcggcgcccgcgtggcctgtcgccccggctgttcggtaccccagcacaggttcagggaaaagggtgccacca

SEQ ID NO: 580 - DNA, 122 bp, Homo sapiens
  misc_feature (61)..(62): /note="This region represents a CpG dinucleotide"
  misc_feature (61)..(61): /note="Nucleotide may be methylated to form 5-methylcytosine"
gagtctgaggaggagaatcgcttgaacccgggaggcggaggttgcagtgagccgagatcgcgccactgcactcgtctgacgacagagcgagactgcgtctcaaagaaaaaaaatttctgctc

SEQ ID NO: 581 - DNA, 122 bp, Homo sapiens
  misc_feature (61)..(62): /note="This region represents a CpG dinucleotide"
  misc_feature (61)..(61): /note="Nucleotide may be methylated to form 5-methylcytosine"
tggcgttcgcgacggtcgccaggggcgcctcccggcgcggcggggcgggtgcagtcacgacgccgcgactccccgcaccccggctgggccccccgactcccaggatctgggatcgattccag

SEQ ID NO: 582 - DNA, 122 bp, Homo sapiens
  misc_feature (61)..(62): /note="This region represents a CpG dinucleotide"
  misc_feature (61)..(61): /note="Nucleotide may be methylated to form 5-methylcytosine"
tgaccgacacattgactaaggctttctgagaaatcttgcttcctgtagcctgcagccattcgttataaaacacagagagcagtctggcccagaacagagtttcccacatttcactcattctt

SEQ ID NO: 583 - DNA, 122 bp, Homo sapiens
  misc_feature (61)..(62): /note="This region represents a CpG dinucleotide"
  misc_feature (61)..(61): /note="Nucleotide may be methylated to form 5-methylcytosine"
ccttctgcagggcttctcaaacctcagcagtactggaattcagaacagatgactctgtggcgggggcatcctatgcaatgcaggatgctcagcagtgtccctggcctccacccacttgatgc

SEQ ID NO: 584 - DNA, 122 bp, Homo sapiens
  misc_feature (61)..(62): /note="This region represents a CpG dinucleotide"
  misc_feature (61)..(61): /note="Nucleotide may be methylated to form 5-methylcytosine"
agagagcaaggggcgaggggctacacacttttaagtgaccagatttcacaagaacccactcgctattgtgagaacagtaccaagaggatgatactaaaccattcatgagaaatacacctctg

SEQ ID NO: 585 - DNA, 122 bp, Homo sapiens
  misc_feature (61)..(62): /note="This region represents a CpG dinucleotide"
  misc_feature (61)..(61): /note="Nucleotide may be methylated to form 5-methylcytosine"
tagatacatagtggaaaccaccgccgggtgtggtggcccacgactgtaaacccagcacttcgggagacccaggtgggcagatagcctgagtgtaggagtttgagaacaacctggcaacatag

SEQ ID NO: 586 - DNA, 122 bp, Homo sapiens
  misc_feature (61)..(62): /note="This region represents a CpG dinucleotide"
  misc_feature (61)..(61): /note="Nucleotide may be methylated to form 5-methylcytosine"
tgcgaaacctgctccaacaactctatgtgagcgtgctacatttaagagttatgggacttccgtttcattatttaagcagattcccaggatttcaggatttcaatcttcaaatatgtgaatta

SEQ ID NO: 587 - DNA, 122 bp, Homo sapiens
  misc_feature (61)..(62): /note="This region represents a CpG dinucleotide"
  misc_feature (61)..(61): /note="Nucleotide may be methylated to form 5-methylcytosine"
tccgcatttcttcaacgtgcttatctttctctgcaaacactccagtgtggtagtcatttgcgccttcctgttctctttgttagcttccattttgtgggtcagtttctcttctgctatttcac

SEQ ID NO: 588 - DNA, 122 bp, Homo sapiens
  misc_feature (61)..(62): /note="This region represents a CpG dinucleotide"
  misc_feature (61)..(61): /note="Nucleotide may be methylated to form 5-methylcytosine"
tgaagccaaaataaatggaggctcacagctcccacagagcagtatataccgatgtgtgtgcgtatatgttgcccatgagatcttatacatagagagtttagtggtcaaatatgcttgggagg

SEQ ID NO: 589 - DNA, 122 bp, Homo sapiens
  misc_feature (61)..(62): /note="This region represents a CpG dinucleotide"
  misc_feature (61)..(61): /note="Nucleotide may be methylated to form 5-methylcytosine"
cacagtgtgcctggatgtctgtgtcccgggacctcggggaagagggcccgcaccggtctgcgaattgcaaggcccggccttccccagcgacgctctggtatccgctgtcccctccctgtacc

SEQ ID NO: 590 - DNA, 122 bp, Homo sapiens
  misc_feature (61)..(62): /note="This region represents a CpG dinucleotide"
  misc_feature (61)..(61): /note="Nucleotide may be methylated to form 5-methylcytosine"
tcgttttgggaaagggctgttatctttgtttcacagttaaactataaactaagtccctcccgtagttagtttggccttcacccagaaatgagtaaggacagcttggaggttatagaagcaag

SEQ ID NO: 591 - DNA, 122 bp, Homo sapiens
  misc_feature (61)..(62): /note="This region represents a CpG dinucleotide"
  misc_feature (61)..(61): /note="Nucleotide may be methylated to form 5-methylcytosine"
agccgcggtccccggcctcgctggcaccagggatcggttcaacggaagacagtttttccacggatgggatgggggtggtggggggatggtttcgggatgattcaagtgtattccatttattg

SEQ ID NO: 592 - DNA, 122 bp, Homo sapiens
  misc_feature (61)..(62): /note="This region represents a CpG dinucleotide"
  misc_feature (61)..(61): /note="Nucleotide may be methylated to form 5-methylcytosine"
gaaatcctagctcattgaactcgcctgcagctctcgggttcctgtggctttcttctttatcggagccagggctacatgccagcaaccatgtccaagggacctgcagttggtattgatcttag

SEQ ID NO: 593 - DNA, 122 bp, Homo sapiens
  misc_feature (61)..(62): /note="This region represents a CpG dinucleotide"
  misc_feature (61)..(61): /note="Nucleotide may be methylated to form 5-methylcytosine"
tcaagtattgtcaactttaacattactccactttaggcaaagttgaaaaatcaaaaatagcggtgttgtacagattatttatgtgcatggttaacttttacttgacacaatcttaagataat

SEQ ID NO: 594 - DNA, 122 bp, Homo sapiens
  misc_feature (61)..(62): /note="This region represents a CpG dinucleotide"
  misc_feature (61)..(61): /note="Nucleotide may be methylated to form 5-methylcytosine"
accattatgtaaatattatagtagttttaaagtagagtcacacactgcataatgacatttcggtcaaagacagacctcatatatgatggtggtcccataaggttataatggagctcaaaaat

SEQ ID NO: 595 - DNA, 122 bp, Homo sapiens
  misc_feature (61)..(62): /note="This region represents a CpG dinucleotide"
  misc_feature (61)..(61): /note="Nucleotide may be methylated to form 5-methylcytosine"
tctgatttttacatcactcaacacatgtacatgcacaatgtgcacatacacacatatccacgctagtaaagctcagaaagcagctgatgtttgcgagcctcagaaataaattaacatgcagc

SEQ ID NO: 596 - DNA, 122 bp, Homo sapiens
  misc_feature (61)..(62): /note="This region represents a CpG dinucleotide"
  misc_feature (61)..(61): /note="Nucleotide may be methylated to form 5-methylcytosine"
gagacttggtcgagaggcgcgggacaagcctggccgctgggactgtgcgctgaggtgcaccgaccgtcgggccgcgagctccccgcagaccctcgcggaatgagctggggggcggcgcgcga

SEQ ID NO: 597 - DNA, 122 bp, Homo sapiens
  misc_feature (61)..(62): /note="This region represents a CpG dinucleotide"
  misc_feature (61)..(61): /note="Nucleotide may be methylated to form 5-methylcytosine"
aaatgttagttccagatattcaataaaaatgtgacgtttttaagagttctaaaaataactcgcacttctccacaccgttaaatggactctcacagccttgaatgagagagcaaaagtcccag

SEQ ID NO: 598 - DNA, 122 bp, Homo sapiens
  misc_feature (61)..(62): /note="This region represents a CpG dinucleotide"
  misc_feature (61)..(61): /note="Nucleotide may be methylated to form 5-methylcytosine"
cccctccccgcccggcaaactgcccggagccaaggccccgcccccagagagaacctgccccgcctccctggcccgggccccgcctccttggcaagcgagtggcgctttcaccttagcaacca

SEQ ID NO: 599 - DNA, 122 bp, Homo sapiens
  misc_feature (61)..(62): /note="This region represents a CpG dinucleotide"
  misc_feature (61)..(61): /note="Nucleotide may be methylated to form 5-methylcytosine"
cgacccgttgccaaggcgactggaaccgcggcccgaggtaactggagggcacggcgggggcggggcgctcatcccaggcggcttctgattggcctcggccgcctcgtgcgtcacagccccgc

SEQ ID NO: 600 - DNA, 122 bp, Homo sapiens
  misc_feature (61)..(62): /note="This region represents a CpG dinucleotide"
  misc_feature (61)..(61): /note="Nucleotide may be methylated to form 5-methylcytosine"
aacaagtgcatcagccatcggggagtgtgagaggaattaatgaaacactgaaagcattgccgatagtcagcatgaatttggagtggacacagaagtatgaaatggaaaatagccccacccca

SEQ ID NO: 601 - DNA, 122 bp, Homo sapiens
  misc_feature (61)..(62): /note="This region represents a CpG dinucleotide"
  misc_feature (61)..(61): /note="Nucleotide may be methylated to form 5-methylcytosine"
agccactgtgcctggcaattactcctactttgttttttttttgagacagtcttgctccatcgcccaggctacagtgcagtggcaatcatagctcactacagccttgacctcctggactcaag

SEQ ID NO: 602 - DNA, 122 bp, Homo sapiens
  misc_feature (61)..(62): /note="This region represents a CpG dinucleotide"
  misc_feature (61)..(61): /note="Nucleotide may be methylated to form 5-methylcytosine"
aaaagataataaagggaaaggagagagagaaaagcattgcctgtggcagggtggagaaggcgaaatgctcagggaggccagaaaaagacccacccattgcagcaccactgaaaagttcaggc

SEQ ID NO: 603 - DNA, 122 bp, Homo sapiens
  misc_feature (61)..(62): /note="This region represents a CpG dinucleotide"
  misc_feature (61)..(61): /note="Nucleotide may be methylated to form 5-methylcytosine"
tttaactttgtgccctgctttttaacttcgtgttgtctctatttatatcttattgcactacgtattgaaaagttgtagttattatttttgattggttcatcttttagtcttctacttaagat

SEQ ID NO: 604 - DNA, 122 bp, Homo sapiens
  misc_feature (61)..(62): /note="This region represents a CpG dinucleotide"
  misc_feature (61)..(61): /note="Nucleotide may be methylated to form 5-methylcytosine"
gcgcccagactgcgcgccgcgccgctgcgcccaacattcccgaggacggcttcgcgggcgcgtatcgtccagaccggagcaccgccccaccgctagcgcaggagacctgccggggaagtcgc

SEQ ID NO: 605 - DNA, 122 bp, Homo sapiens
  misc_feature (61)..(62): /note="This region represents a CpG dinucleotide"
  misc_feature (61)..(61): /note="Nucleotide may be methylated to form 5-methylcytosine"
gggcgcaggaccccagccccggatcacctgggctcgccgcgcatcgtccttctccccaaccgagccggactccacgggctcaacagcccccagccccggtggtccccgctgccctgcccgct

SEQ ID NO: 606 - DNA, 122 bp, Homo sapiens
  misc_feature (61)..(62): /note="This region represents a CpG dinucleotide"
  misc_feature (61)..(61): /note="Nucleotide may be methylated to form 5-methylcytosine"
ctcacaaagccacgattgaggagctgcggagcagatgtgggtgctgttcgacgtgcggcccgagtgccagcacctcttctaccggggcaagcagtttgaaaatggatatgccttatttgact

SEQ ID NO: 607 - DNA, 122 bp, Homo sapiens
  misc_feature (61)..(62): /note="This region represents a CpG dinucleotide"
  misc_feature (61)..(61): /note="Nucleotide may be methylated to form 5-methylcytosine"
ccggagcgcgctgctgccctctaccggtcatccgtgcggccggacaccgtgtcaggcccgcgaggagggctctgccgcagtcccggggaacagcacccagcagcgccactgggagaggaaac

SEQ ID NO: 608 - DNA, 122 bp, Homo sapiens
  misc_feature (61)..(62): /note="This region represents a CpG dinucleotide"
  misc_feature (61)..(61): /note="Nucleotide may be methylated to form 5-methylcytosine"
cggcaagcggagcagcgaggcagggtagcttcatcacactcgcggcggatgcggattccgcgccgccccggctctagctgctcaggcgaccgccaccctcgcctcgccgccgcccgtgcaca

SEQ ID NO: 609 - DNA, 122 bp, Homo sapiens
  misc_feature (61)..(62): /note="This region represents a CpG dinucleotide"
  misc_feature (61)..(61): /note="Nucleotide may be methylated to form 5-methylcytosine"
tattttaatatctgataggctagtctccattttcttcggagattttttcttttttttctgcgtttgcttaattgttatttcttttttttttttttttttttgagatggaattttgctcttgt

SEQ ID NO: 610 - DNA, 122 bp, Homo sapiens
  misc_feature (61)..(62): /note="This region represents a CpG dinucleotide"
  misc_feature (61)..(61): /note="Nucleotide may be methylated to form 5-methylcytosine"
cagacctgaaactctcaccctgtacagaactgaagcaactgacttgcagctcctgacatacggctactgatgtgaaacaagagtaaaacaaaaatatttgttgttgtgaatcacaaatattt

SEQ ID NO: 611 - DNA, 122 bp, Homo sapiens
  misc_feature (61)..(62): /note="This region represents a CpG dinucleotide"
  misc_feature (61)..(61): /note="Nucleotide may be methylated to form 5-methylcytosine"
gtgggacttaacaagggcacaaataagtaaagggcccagagcctaccctcagggagcttacggatccagtgaggcagatccagacacctgggaagaggggagccagcgtgccaggccagagg

SEQ ID NO: 612 - DNA, 122 bp, Homo sapiens
  misc_feature (61)..(62): /note="This region represents a CpG dinucleotide"
  misc_feature (61)..(61): /note="Nucleotide may be methylated to form 5-methylcytosine"
ggcagggagagctgacacttcctaggattctgcatccttctcagggcccagaaatgaatgcgaggtaattaaagcagaaagcaatttgcagcagctgagctcagctctccggagctgccagg

SEQ ID NO: 613 - DNA, 122 bp, Homo sapiens
  misc_feature (61)..(62): /note="This region represents a CpG dinucleotide"
  misc_feature (61)..(61): /note="Nucleotide may be methylated to form 5-methylcytosine"
atgctggagctaggttttgaacccagggattttgaactccaaagtttgtgttcttaatctcgtaccattgggatgaaattgtacagtgaaagacaagcgatgatatagatgattgcctaagt

SEQ ID NO: 614 - DNA, 122 bp, Homo sapiens
  misc_feature (61)..(62): /note="This region represents a CpG dinucleotide"
  misc_feature (61)..(61): /note="Nucleotide may be methylated to form 5-methylcytosine"
tgttccacctcagatcatcaggcattagattctcataaggatggtgcaacctagatcactcgcatgtgcagttcacaataggtttctccctcctatgagaatctaatgccaccgctgatctg

SEQ ID NO: 615 - DNA, 122 bp, Homo sapiens
  misc_feature (61)..(62): /note="This region represents a CpG dinucleotide"
  misc_feature (61)..(61): /note="Nucleotide may be methylated to form 5-methylcytosine"
gcctgaatcagctttttttttcttccttctctggcctctatctacctagtcctgaaatgacgtcatactctcttaacataaaagtaagtgaacaacattctcaatttctatttgaggctaac

SEQ ID NO: 616 - DNA, 122 bp, Homo sapiens
  misc_feature (61)..(62): /note="This region represents a CpG dinucleotide"
  misc_feature (61)..(61): /note="Nucleotide may be methylated to form 5-methylcytosine"
tcatacgaaatggtcaaactgttttcccaagtggctgtagttttttacatgcccactagtcgtgcttgggaattctgtttctcttcaccctcatcaaaaatcggtgtggtcagtcttttaaa

SEQ ID NO: 617 - DNA, 122 bp, Homo sapiens
  misc_feature (61)..(62): /note="This region represents a CpG dinucleotide"
  misc_feature (61)..(61): /note="Nucleotide may be methylated to form 5-methylcytosine"
gggatacatccctaactctagacagcaggttgttaaacacggggcctggtatccactaggcgtcccataaatgctgccacttttgtggttccgaggaggcggctcactccgttcgggcttgg

SEQ ID NO: 618 - DNA, 122 bp, Homo sapiens
  misc_feature (61)..(62): /note="This region represents a CpG dinucleotide"
  misc_feature (61)..(61): /note="Nucleotide may be methylated to form 5-methylcytosine"
ttcagctgttcctgaacttgccagcccctgctcacaaaggctgcagagccagaacagagacgaagaagctcctgatgcctgtgcctctgtttaggtggtgtgtgtgtggggtgtatgtgtgt

SEQ ID NO: 619 - DNA, 122 bp, Homo sapiens
  misc_feature (61)..(62): /note="This region represents a CpG dinucleotide"
  misc_feature (61)..(61): /note="Nucleotide may be methylated to form 5-methylcytosine"
gaagactttaaaagtttctttttatccttggaactctgacacatcaaagatgcgtctagacgtggttctttccactaattttctgggcacctaggaggcccttttaaatctgaaaaattctg

SEQ ID NO: 620 - DNA, 122 bp, Homo sapiens
  misc_feature (61)..(62): /note="This region represents a CpG dinucleotide"
  misc_feature (61)..(61): /note="Nucleotide may be methylated to form 5-methylcytosine"
gcgggagataacctgtccctgctgctccgcacctcctcgcccggcggcgccttccggacccgcacctcctcgccgctgtcgggctcgtcctgctgctgctgctgctgctcgtcgcgccgggg

SEQ ID NO: 621 - DNA, 122 bp, Homo sapiens
  misc_feature (61)..(62): /note="This region represents a CpG dinucleotide"
  misc_feature (61)..(61): /note="Nucleotide may be methylated to form 5-methylcytosine"
catccaagtactaaccagacctgaccctgcttggctttcaagatcagttaagatcgagtacgttaagggtagtgtagccacagacagaattgaaatagtttctatgaggagttagtacagtg

SEQ ID NO: 622 - DNA, 122 bp, Homo sapiens
  misc_feature (61)..(62): /note="This region represents a CpG dinucleotide"
  misc_feature (61)..(61): /note="Nucleotide may be methylated to form 5-methylcytosine"
agcgcttgctcccgccgccgtcaccgccacaggcacagactctgccacagccgccgccgccgctgccgccgcccggtcgccgaagcagcaatacctcctggcttccgctccccgtcggtgtc

SEQ ID NO: 623 - DNA, 122 bp, Homo sapiens
  misc_feature (61)..(62): /note="This region represents a CpG dinucleotide"
  misc_feature (61)..(61): /note="Nucleotide may be methylated to form 5-methylcytosine"
actcccagaaatatgcccatgaaatctcctagatgctgaaaatggaccaaatctcaccaacgccttttgaaggcaaattattcaaatggataaatgtggattactatatctttagggttttt

SEQ ID NO: 624 - DNA, 122 bp, Homo sapiens
  misc_feature (61)..(62): /note="This region represents a CpG dinucleotide"
  misc_feature (61)..(61): /note="Nucleotide may be methylated to form 5-methylcytosine"
cggccgcagtgtgccgcccgctgcgctatgcggggctcgtctccccgcgcctatgtcgcacgctggccagcgcctcctggctaagcggcctcaccaactcggttgcgcaaaccgcgctcctg

SEQ ID NO: 625 - DNA, 122 bp, Homo sapiens
  misc_feature (61)..(62): /note="This region represents a CpG dinucleotide"
  misc_feature (61)..(61): /note="Nucleotide may be methylated to form 5-methylcytosine"
tggatacagtgtagctaggtcctagtgtagctaggtagcagagctagggtctcaccaggccgaaatgaaggtgtcggagggggctgatctcaccggaggcttgggtccttttccaagctcat

SEQ ID NO: 626 - DNA, 122 bp, Homo sapiens
  misc_feature (61)..(62): /note="This region represents a CpG dinucleotide"
  misc_feature (61)..(61): /note="Nucleotide may be methylated to form 5-methylcytosine"
acctagtaatatgtataaacccttgggaacagaattgcataaaaatctcagttactaggccggtctgattgtagaccagtgattggtttataaccagtaattgatcacaactggttagattt

SEQ ID NO: 627 - DNA, 122 bp, Homo sapiens
  misc_feature (61)..(62): /note="This region represents a CpG dinucleotide"
  misc_feature (61)..(61): /note="Nucleotide may be methylated to form 5-methylcytosine"
gctgtggccgcagctgaggcccgacgagcttccggccgggtctttgcccttcactggccgcgtgaacatcacggtgcgctgcacggtggccacctctcgactgctgctgcatagcctcttcc

SEQ ID NO: 628 - DNA, 122 bp, Homo sapiens
  misc_feature (61)..(62): /note="This region represents a CpG dinucleotide"
  misc_feature (61)..(61): /note="Nucleotide may be methylated to form 5-methylcytosine"
gtagctccccattcttccctcccccagctctggaaacaaccatgctactttctgcctctgcgcatttgactactctaggtacctctgtaagtggaatcctagtgagaggtgaagccagctgg

SEQ ID NO: 629 - DNA, 122 bp, Homo sapiens
  misc_feature (61)..(62): /note="This region represents a CpG dinucleotide"
  misc_feature (61)..(61): /note="Nucleotide may be methylated to form 5-methylcytosine"
ctcgcctgccgcttctgccggatcaaggagctggctatcgccgcagccatagctgctcagcgagggcctcaggccccagcctctactgcgccctccggcttgcgctccgccggggcgagggc

SEQ ID NO: 630 - DNA, 122 bp, Homo sapiens
  misc_feature (61)..(62): /note="This region represents a CpG dinucleotide"
  misc_feature (61)..(61): /note="Nucleotide may be methylated to form 5-methylcytosine"
cgccacctgaaccgagacacctctttttgcactcaacttaccgcggctgggctgagctttcggcgcccccaggagcttttctctccttcctcccaccgagctcttcattctcctgctggcgg

SEQ ID NO: 631 - DNA, 122 bp, Homo sapiens
  misc_feature (61)..(62): /note="This region represents a CpG dinucleotide"
  misc_feature (61)..(61): /note="Nucleotide may be methylated to form 5-methylcytosine"
caaccggttccgccgcgtttgtgggctggtagcccggaatacatttcccagaggccttcgcggccgacgtgcttcgcgcaggaacgcagccgcctcccgactggaggacgcggtagcggagc

SEQ ID NO: 632 - DNA, 122 bp, Homo sapiens
  misc_feature (61)..(62): /note="This region represents a CpG dinucleotide"
  misc_feature (61)..(61): /note="Nucleotide may be methylated to form 5-methylcytosine"
caggtgaacaggtgcaggagcacttttggatgccagcaggaacaaattctgtgcaggccccgcagcagcatctgggggggtgcccgcacccctgaaacctcgagggggagggtgttacagtg

SEQ ID NO: 633 - DNA, 122 bp, Homo sapiens
  misc_feature (61)..(62): /note="This region represents a CpG dinucleotide"
  misc_feature (61)..(61): /note="Nucleotide may be methylated to form 5-methylcytosine"
gcactcccctttcttgagtgtcactttacaataaatctccatacttttactattttctgacgcatccttgaatttattctcatgacatgtcaagagcgggactcctcctggagtccaggtcc

SEQ ID NO: 634 - DNA, 122 bp, Homo sapiens
  misc_feature (61)..(62): /note="This region represents a CpG dinucleotide"
  misc_feature (61)..(61): /note="Nucleotide may be methylated to form 5-methylcytosine"
tcctccccaccttctctcccgaaggcgaaaatggcagggccaggcgagaacctgggacagcggtggccctagccctgcgatcctcacccctcctgctaggagaggctgcgggctgcccgcgg

SEQ ID NO: 635 - DNA, 122 bp, Homo sapiens
  misc_feature (61)..(62): /note="This region represents a CpG dinucleotide"
  misc_feature (61)..(61): /note="Nucleotide may be methylated to form 5-methylcytosine"
ggcaaccctgactcggaccgctcgggagagccccaggagaggccagcgccgcgcagcagccgccccgctgcgcccacctccccggctgctcccggagggctcacaaaggcggtggccgcccg

SEQ ID NO: 636 - DNA, 122 bp, Homo sapiens
  misc_feature (61)..(62): /note="This region represents a CpG dinucleotide"
  misc_feature (61)..(61): /note="Nucleotide may be methylated to form 5-methylcytosine"
catagaagggagtgtctgggttaagacaaggggttgtggaaaccaaggttcttattatgccgatgaagcttacaggtaacaggcttgagaaagaaaagattgtaaatgtttcttatcagact

SEQ ID NO: 637 - DNA, 122 bp, Homo sapiens
  misc_feature (61)..(62): /note="This region represents a CpG dinucleotide"
  misc_feature (61)..(61): /note="Nucleotide may be methylated to form 5-methylcytosine"
cagaagcgctcccgctgttccctagttgagctggaaacagtggccaagcgtgttttaaatcgagtttccgtgtggctagatattatctgctggttactcttattttttttctccattcgttg

SEQ ID NO: 638 - DNA, 122 bp, Homo sapiens
  misc_feature (61)..(62): /note="This region represents a CpG dinucleotide"
  misc_feature (61)..(61): /note="Nucleotide may be methylated to form 5-methylcytosine"
gctgctcacctcctgctgtgtggcctggttcctaacaggccagggagcagaactggtctgcggccctgggagttggggacccctggtctaaattatatgagtctatgaagttttagactggt

SEQ ID NO: 639 - DNA, 122 bp, Homo sapiens
  misc_feature (61)..(62): /note="This region represents a CpG dinucleotide"
  misc_feature (61)..(61): /note="Nucleotide may be methylated to form 5-methylcytosine"
ttatttcgggaaaagcgattctccttaggaattatcttttctgataatcaaaactacaatcgattatgatttctttttagccttagaggaaactcatttgaaccatagcaattatgttgatt

SEQ ID NO: 640 - DNA, 122 bp, Homo sapiens
  misc_feature (61)..(62): /note="This region represents a CpG dinucleotide"
  misc_feature (61)..(61): /note="Nucleotide may be methylated to form 5-methylcytosine"
aggcaattacaatgaaaaaacccagaactttcagaatgttagcattttatttgttgatgccgtgtgtgtgtgtgtgtgtgtgtgtgtgtgtgtgtgtgtgtgtgtgtatctggcaaaagaaa

SEQ ID NO: 641 - DNA, 122 bp, Homo sapiens
  misc_feature (61)..(62): /note="This region represents a CpG dinucleotide"
  misc_feature (61)..(61): /note="Nucleotide may be methylated to form 5-methylcytosine"
ttgctgcccatgctgcttctgagccatggagtcaccaccagtgtggtggggtcttggacccgaagaaaggagaagacactgtgccccccgattagctgagtgtggccaggctgtgtgtttgc

SEQ ID NO: 642 - DNA, 122 bp, Homo sapiens
  misc_feature (61)..(62): /note="This region represents a CpG dinucleotide"
  misc_feature (61)..(61): /note="Nucleotide may be methylated to form 5-methylcytosine"
cacttcgggcgggagtacaggagcccttccttgggcaccatgcgaaggctgctcaagtagcggcccctgccctcccttcccctgtccccgtccccgtctccgtctccccgtccctgtccccc

SEQ ID NO: 643 - DNA, 122 bp, Homo sapiens
  misc_feature (61)..(62): /note="This region represents a CpG dinucleotide"
  misc_feature (61)..(61): /note="Nucleotide may be methylated to form 5-methylcytosine"
cctcttccgctaacttcccggcagcgcgccgctcagggtgggggccccgagggctggggccgtcggcttccccctggggatcccccgcttcagagaaagccaagcgttaggcgcagccaaag

SEQ ID NO: 644 - DNA, 122 bp, Homo sapiens
  misc_feature (61)..(62): /note="This region represents a CpG dinucleotide"
  misc_feature (61)..(61): /note="Nucleotide may be methylated to form 5-methylcytosine"
taaatacctgactcatatgctgctactccctcaacagtgtccatggcagacatcactagtcgatcatgatcctttatactgctgagccctgatgtaaccccagaaggcttcacaatataatg

SEQ ID NO: 645 - DNA, 122 bp, Homo sapiens
  misc_feature (61)..(62): /note="This region represents a CpG dinucleotide"
  misc_feature (61)..(61): /note="Nucleotide may be methylated to form 5-methylcytosine"
aagtgatctgcccactctgcctcctaaaatgctgggattacaggtgtgagccaccacacccggctagcgtgtttcttaagttggcaattttgaagatagaagccatttctttgcccctttgt

SEQ ID NO: 646 - DNA, 122 bp, Homo sapiens
  misc_feature (61)..(62): /note="This region represents a CpG dinucleotide"
  misc_feature (61)..(61): /note="Nucleotide may be methylated to form 5-methylcytosine"
atgtgtcgtatctgataaatctgtgattgacccaaagtcacagattttctcctatgttctcgtccagaggttttatagttttagcacttacaatttgggctaggatcctcttcaccttaatt

SEQ ID NO: 647 - DNA, 122 bp, Homo sapiens
  misc_feature (61)..(62): /note="This region represents a CpG dinucleotide"
  misc_feature (61)..(61): /note="Nucleotide may be methylated to form 5-methylcytosine"
tcttgttaaagctatgtccacttggttaagtgacttaactttactgtgcctcagtttccccgtctgtaaaatgggttgctctgagtattaaatgagtttattttgtaaagtgcttagaacag

SEQ ID NO: 648 - DNA, 122 bp, Homo sapiens
  misc_feature (61)..(62): /note="This region represents a CpG dinucleotide"
  misc_feature (61)..(61): /note="Nucleotide may be methylated to form 5-methylcytosine"
accatcttggctaacacggtgaatccccgtctctactaaacatacaaaaacaaaactagccgggcgtggtggcgggcgcctgtagtcccagctactccggaggctgaggcaggagaatggcg

SEQ ID NO: 649 - DNA, 122 bp, Homo sapiens
  misc_feature (61)..(62): /note="This region represents a CpG dinucleotide"
  misc_feature (61)..(61): /note="Nucleotide may be methylated to form 5-methylcytosine"
tacacctattaggacagctaaaataaaaaatagtgacaataccaaatgatggcgaggattcggagaaactgaatcactcatgcattgttgatgggactgtaaaatggtacagtccctttgga

SEQ ID NO: 650 - DNA, 122 bp, Homo sapiens
  misc_feature (61)..(62): /note="This region represents a CpG dinucleotide"
  misc_feature (61)..(61): /note="Nucleotide may be methylated to form 5-methylcytosine"
agcgacctgtgtagctgtcacgtgggcctctggggcagaccctggagatcgggctcgcggcgccttccatcgtggctccgcgctggggcttgcggagcacgcttcccgcccctcggagcccg

SEQ ID NO: 651 - DNA, 122 bp, Homo sapiens
  misc_feature (61)..(62): /note="This region represents a CpG dinucleotide"
  misc_feature (61)..(61): /note="Nucleotide may be methylated to form 5-methylcytosine"
tcttcttcacaactctttaaaaatataaaggctatacttagttcaagggctatagaggaacggtgggccagatttggtctgcacactgcagtttgccgacccctgtgctatactaagcactc

SEQ ID NO: 652 - DNA, 122 bp, Homo sapiens
  misc_feature (61)..(62): /note="This region represents a CpG dinucleotide"
  misc_feature (61)..(61): /note="Nucleotide may be methylated to form 5-methylcytosine"
ccgccgcgggttcccagggctggtggtagttgccgtcccacacgtacgtggcggggtcctcgtcagcgaagacctcgcggaacatgtcgaccatgtagaggtcctcggcgcggttgccatcc

SEQ ID NO: 653 - DNA, 122 bp, Homo sapiens
  misc_feature (61)..(62): /note="This region represents a CpG dinucleotide"
  misc_feature (61)..(61): /note="Nucleotide may be methylated to form 5-methylcytosine"
atctgaggttagtttcatcgtttcgttgaaagttaaaaccctaagtcgacgttccccagccgcctaccccccagcagagagtccttccccggggagtcctgccctggggtgccgcctcgagg

SEQ ID NO: 654 - DNA, 122 bp, Homo sapiens
  misc_feature (61)..(62): /note="This region represents a CpG dinucleotide"
  misc_feature (61)..(61): /note="Nucleotide may be methylated to form 5-methylcytosine"
tcctaaatcccgagcgaaagcccaagctgaacatgaactctgcccggaggcgacgggctgcggcggagggggagagagaggaggacaggctgcgaccccgggctggggacgccagggcaggg

SEQ ID NO: 655 - DNA, 122 bp, Homo sapiens
  misc_feature (61)..(62): /note="This region represents a CpG dinucleotide"
  misc_feature (61)..(61): /note="Nucleotide may be methylated to form 5-methylcytosine"
gcctgcctgcctcgacctccgcatccccttgcaccgtccgctcgcgtgctgcggggcactcgcagcactaccttcggtggggccgcagcaccctgagctcccgggactcccccaccgccccc

SEQ ID NO: 656 - DNA, 122 bp, Homo sapiens
  misc_feature (61)..(62): /note="This region represents a CpG dinucleotide"
  misc_feature (61)..(61): /note="Nucleotide may be methylated to form 5-methylcytosine"
agttgaaccattaactattaaaagtcatgttatcacttatttattttggatgatggataacgggtgtttattatatctttctgtatgctttaatttccaaaatgaaagtgtttaaaaaataa

SEQ ID NO: 657 - DNA, 122 bp, Homo sapiens
  misc_feature (61)..(62): /note="This region represents a CpG dinucleotide"
  misc_feature (61)..(61): /note="Nucleotide may be methylated to form 5-methylcytosine"
ctaaaatgtatgtcataaaataaacttagttaagcactgtaatacctttcaacttcctaccgaaataagctgccatggtagaggcagagaattattttagctgatggtgctttttgtgattt

SEQ ID NO: 658 - DNA, 122 bp, Homo sapiens
  misc_feature (61)..(62): /note="This region represents a CpG dinucleotide"
  misc_feature (61)..(61): /note="Nucleotide may be methylated to form 5-methylcytosine"
aggactgtggtggcagccggtgtgctggttgtcagctgatgtccctgtctgtgatttttccgtgtgaatgcagccttgactgggcatgtagatcagaggtgacaagtcctgggcacctctgc

SEQ ID NO: 659 - DNA, 122 bp, Homo sapiens
  misc_feature (61)..(62): /note="This region represents a CpG dinucleotide"
  misc_feature (61)..(61): /note="Nucleotide may be methylated to form 5-methylcytosine"
caacctccaccagcaagtctagtgccctttctactacaccacaaagaaaaccacagagaacgtagcaagagagggctaagaataatctgaaattagcatatcggaaattcctgttttgatta

SEQ ID NO: 660 - DNA, 122 bp, Homo sapiens
  misc_feature (61)..(62): /note="This region represents a CpG dinucleotide"
  misc_feature (61)..(61): /note="Nucleotide may be methylated to form 5-methylcytosine"
cccccgggaccaaatggcccgcaaggtttggggcagcggcgttgcaggagatgagctcagcgcaaagggaaccccgcagcggcgagtgcggctgctggcctgcgcgctgtggccccaacagg

SEQ ID NO: 661 - DNA, 122 bp, Homo sapiens
  misc_feature (61)..(62): /note="This region represents a CpG dinucleotide"
  misc_feature (61)..(61): /note="Nucleotide may be methylated to form 5-methylcytosine"
ctccttcttctggccctcacttccctacacctgccaggcacctttgagcagtgcacaacacgcacacccacacacagtggacctggtgggaggcaggaccttttaacaaccttcctgcagca

SEQ ID NO: 662 - DNA, 122 bp, Homo sapiens
  misc_feature (61)..(62): /note="This region represents a CpG dinucleotide"
  misc_feature (61)..(61): /note="Nucleotide may be methylated to form 5-methylcytosine"
atctaccgtctccaatctccatctccgaagttatgcccacttcctcgaagtttggagccacgcgaactacactgcccagaaggcgccgcgccgtgagccgcgatgcttggccaatgaaaaga

SEQ ID NO: 663 - DNA, 122 bp, Homo sapiens
  misc_feature (61)..(62): /note="This region represents a CpG dinucleotide"
  misc_feature (61)..(61): /note="Nucleotide may be methylated to form 5-methylcytosine"
cgttgggcacccgggcaggagtctgcgaacgctgagtttctctggaaaggcgcggacccccggaggagccgtcccagccgcctggggagacgccccctcctctcccggtcttctttcccggg

SEQ ID NO: 664 - DNA, 122 bp, Homo sapiens
  misc_feature (61)..(62): /note="This region represents a CpG dinucleotide"
  misc_feature (61)..(61): /note="Nucleotide may be methylated to form 5-methylcytosine"
ggtttatcgcaggctgcagtgataatccctgcggagagtaagggccggcctgggtgtcagcgcagggctagatcccgcctagcagtgggacgggacaggtcggggaggggcctaaaccaatc

SEQ ID NO: 665 - DNA, 122 bp, Homo sapiens
  misc_feature (61)..(62): /note="This region represents a CpG dinucleotide"
  misc_feature (61)..(61): /note="Nucleotide may be methylated to form 5-methylcytosine"
attttcagtcaaacgctgtacataagaccagtaagatgaatgcaaggacaggtgagtgggcgtggtgagcttggtgtgagcagttccaccaggatactattattacacaatttccaaggacc

SEQ ID NO: 666 - DNA, 122 bp, Homo sapiens
  misc_feature (61)..(62): /note="This region represents a CpG dinucleotide"
  misc_feature (61)..(61): /note="Nucleotide may be methylated to form 5-methylcytosine"
acacagctgtagggctcctcctttaaactccccagctctggctgctcctcccctccccttcggtcctgtagtctgcttcccttgggcccttcttggtgccttctggagtcccaggtctcaac

SEQ ID NO: 667 - DNA, 122 bp, Homo sapiens
  misc_feature (61)..(62): /note="This region represents a CpG dinucleotide"
  misc_feature (61)..(61): /note="Nucleotide may be methylated to form 5-methylcytosine"
ttatttggaacctgagatgagccagatacatgaacataattagaaccggatgtggtggcacgcttctgtggtaccagccacttgggagactgaggcaggagtaccacttgagcccaaaagtt

SEQ ID NO: 668 - DNA, 122 bp, Homo sapiens
  misc_feature (61)..(62): /note="This region represents a CpG dinucleotide"
  misc_feature (61)..(61): /note="Nucleotide may be methylated to form 5-methylcytosine"
cagttctgggcatggtggctctagatcgctgtaatcccagcgacccagaaccttggaatgcggccttatttgaaaatagggtatttgcagatgtaattagttaagatgaagtcatggtggat

SEQ ID NO: 669 - DNA, 122 bp, Homo sapiens
  misc_feature (61)..(62): /note="This region represents a CpG dinucleotide"
  misc_feature (61)..(61): /note="Nucleotide may be methylated to form 5-methylcytosine"
gctccactgccaccactgcccacgccctgcgtccccgtttgaccgcgtggagccggaccccgccttcctcgccccgcgctgccccaggcctgccccgcaccagcagctaagcgcaggtctct

SEQ ID NO: 670 - DNA, 122 bp, Homo sapiens
  misc_feature (61)..(62): /note="This region represents a CpG dinucleotide"
  misc_feature (61)..(61): /note="Nucleotide may be methylated to form 5-methylcytosine"
tggaaaaaagccccctcagccgtgaaaacaaaatctttgaacgcgtgatcattgcgagggcggctgatatcctaatacgtgcattgttctcggcctggcccaggcgcgccccggcctcctta

SEQ ID NO: 671 - DNA, 122 bp, Homo sapiens
  misc_feature (61)..(62): /note="This region represents a CpG dinucleotide"
  misc_feature (61)..(61): /note="Nucleotide may be methylated to form 5-methylcytosine"
cttttggcctgtctttattgaatttcttttcttttcttttctttcttttggagacagtctcgctctgtcgcccaggctggagtgcagtgccccaatcttggctcactgcaacctctgcctcc

SEQ ID NO: 672 - DNA, 122 bp, Homo sapiens
  misc_feature (61)..(62): /note="This region represents a CpG dinucleotide"
  misc_feature (61)..(61): /note="Nucleotide may be methylated to form 5-methylcytosine"
gcagggtttgaaacatggcggacgacgtagaccaggtaagtgtattttaaggaggtcgctcgaaggagcttcttgtactaggctgctttttccagactcaggaaaaatggccagtcgtgcct

SEQ ID NO: 673 - DNA, 122 bp, Homo sapiens
  misc_feature (61)..(62): /note="This region represents a CpG dinucleotide"
  misc_feature (61)..(61): /note="Nucleotide may be methylated to form 5-methylcytosine"
gtggtgttgtgtacgtgaatccatcagatcaacgcgacggacactccccaagggccaaatcggaccgcctctcactaggcggaaagttttgaaacttttgcgcgctaaaaatgatgagccag

SEQ ID NO: 674 - DNA, 122 bp, Homo sapiens
  misc_feature (61)..(62): /note="This region represents a CpG dinucleotide"
  misc_feature (61)..(61): /note="Nucleotide may be methylated to form 5-methylcytosine"
ttaccactggggaacaattcctgtcggccaccgcgcaactgtgcgactgaccagaggaggcgtaaccagggcctactacagcgcagaatagggggcgtggccgccatcctccaagtccattg

SEQ ID NO: 675 - DNA, 122 bp, Homo sapiens
  misc_feature (61)..(62): /note="This region represents a CpG dinucleotide"
  misc_feature (61)..(61): /note="Nucleotide may be methylated to form 5-methylcytosine"
aattgaaataatgttattaacttaatgactttatttttcctaaataaagacctctgtggccgggcgaggtggctcatgcctgtaggaggcggaggtgggcagatcacttgaggccaggagtt

SEQ ID NO: 676 - DNA, 122 bp, Homo sapiens
  misc_feature (61)..(62): /note="This region represents a CpG dinucleotide"
  misc_feature (61)..(61): /note="Nucleotide may be methylated to form 5-methylcytosine"
agctggcttcggccggccagacggccttcacgtcgcaggcgccaggctacgcggctgctgcggccctgggccatcaccatcacccgggccacgtcggctcctattccagcgcagccttcaac

SEQ ID NO: 677 - DNA, 122 bp, Homo sapiens
  misc_feature (61)..(62): /note="This region represents a CpG dinucleotide"
  misc_feature (61)..(61): /note="Nucleotide may be methylated to form 5-methylcytosine"
actgtagctttaaggagggctggggccgggtgcagcggcacctggagtctcggtggaacccggcagcggtgggcgcggaccccggagaggctgccccgagcccgagcaccccctgaccgggc

SEQ ID NO: 678 - DNA, 122 bp, Homo sapiens
  misc_feature (61)..(62): /note="This region represents a CpG dinucleotide"
  misc_feature (61)..(61): /note="Nucleotide may be methylated to form 5-methylcytosine"
tttagcccagttatcttggttaaagataaggtgtgtctggtaggcattgatttttctttccggagaaaaaacttaggaggatttcctcttgatgaacaaggctagcctgctgagcctttgag

SEQ ID NO: 679 - DNA, 122 bp, Homo sapiens
  misc_feature (61)..(62): /note="This region represents a CpG dinucleotide"
  misc_feature (61)..(61): /note="Nucleotide may be methylated to form 5-methylcytosine"
atctcaaaagatatgaagacgtaattcagaggaaaataaatgcaattctatcctggcacacgaaaagatattcaggctcacttaactgcaaatcaaatatgtggggtagcatcttccaccag

SEQ ID NO: 680 - DNA, 122 bp, Homo sapiens
  misc_feature (61)..(62): /note="This region represents a CpG dinucleotide"
  misc_feature (61)..(61): /note="Nucleotide may be methylated to form 5-methylcytosine"
ttgatgattcaatctgctgaactatgcaactatcatagtacccttttaaccatttttaagcgtacagttcagtagtgtttagtgtgttcacatggttgtgcaatgaatccccagaactctct

SEQ ID NO: 681 - DNA, 122 bp, Homo sapiens
  misc_feature (61)..(62): /note="This region represents a CpG dinucleotide"
  misc_feature (61)..(61): /note="Nucleotide may be methylated to form 5-methylcytosine"
gaagttagagcctctgcgtgcgctccggggcccggcgagaggatgcgcaaggtggagagccgcggggaagggggcagagaggtaaaggctgaaggtgccccggggaaccccggcgggcggcc

SEQ ID NO: 682 - DNA, 122 bp, Homo sapiens
  misc_feature (61)..(62): /note="This region represents a CpG dinucleotide"
  misc_feature (61)..(61): /note="Nucleotide may be methylated to form 5-methylcytosine"
ccccacccaccccaccggcgggtcttgggctccgaacccagggcgccccgcgcaccgagccgttgcgtttgaaacccacagaaagaattcccccgctcgacgacggcgagggtgtgggagct

SEQ ID NO: 683 - DNA, 122 bp, Homo sapiens
  misc_feature (61)..(62): /note="This region represents a CpG dinucleotide"
  misc_feature (61)..(61): /note="Nucleotide may be methylated to form 5-methylcytosine"
cagctactgcgggaggctctgggaggccagcggaaggcgcagcgcgcggtggacggtgctcgggcgtagagggggagagcggccggtagagggggagagcagaccagcccggccgccggcga

SEQ ID NO: 684 - DNA, 122 bp, Homo sapiens
  misc_feature (61)..(62): /note="This region represents a CpG dinucleotide"
  misc_feature (61)..(61): /note="Nucleotide may be methylated to form 5-methylcytosine"
ccccggccgcgccgggcgcggggctcgggattcgggagaccgcgcggcgccgaagccacgcgtcagccccactgtcccgcgcgcctcgccccaggcctcgggctcttcctccgcacctcgta

SEQ ID NO: 685 - DNA, 122 bp, Homo sapiens
  misc_feature (61)..(62): /note="This region represents a CpG dinucleotide"
  misc_feature (61)..(61): /note="Nucleotide may be methylated to form 5-methylcytosine"
gaacttaatcatattgagaaatttattccacagtatgtttaagaattaacccatttatgccgaaggttgcaattttttgaatttttggaatcagaccttgagcagtaggatataaataattc

SEQ ID NO: 686 - DNA, 122 bp, Homo sapiens
  misc_feature (61)..(62): /note="This region represents a CpG dinucleotide"
  misc_feature (61)..(61): /note="Nucleotide may be methylated to form 5-methylcytosine"
caggccggtcccagccgcccggagccccagtgcgcgatggcggccggcaaactgcgcctgcgcactgggcctcaccgcggactacgactcccacaatgccgcgaggctgtgccgcgcaccgg

SEQ ID NO: 687 - DNA, 122 bp, Homo sapiens
  misc_feature (61)..(62): /note="This region represents a CpG dinucleotide"
  misc_feature (61)..(61): /note="Nucleotide may be methylated to form 5-methylcytosine"
cagttgtacccaacccctatactgtgctctctcaaataccagaggaagcagaatggttcacggttctggagctcaaggatgcctgcttctgtattcccctgcactctgactcccagtttctc

SEQ ID NO: 688 - DNA, 122 bp, Homo sapiens
  misc_feature (61)..(62): /note="This region represents a CpG dinucleotide"
  misc_feature (61)..(61): /note="Nucleotide may be methylated to form 5-methylcytosine"
atgtctctgtgagtttaaatagaatttaattcattcaaaattcacactcccagctgagtgcggtggctcgtacctgtgatcccagcactttgggaggccaaggtaggtggatcatttgaggt

SEQ ID NO: 689 - DNA, 122 bp, Homo sapiens
  misc_feature (61)..(62): /note="This region represents a CpG dinucleotide"
  misc_feature (61)..(61): /note="Nucleotide may be methylated to form 5-methylcytosine"
gtccggaccctgttctcctgctagcaagtcccattaagccgccgggcgcttgtgttttctcggcttctttagttccactcgctcgcggcactctggtaactttgttttgagatcaccttacc

SEQ ID NO: 690 - DNA, 122 bp, Homo sapiens
  misc_feature (61)..(62): /note="This region represents a CpG dinucleotide"
  misc_feature (61)..(61): /note="Nucleotide may be methylated to form 5-methylcytosine"
ttgctgttgtccacctgaactcccaagcaaccagagtccggtccttccaatcaggaaagtcggaatctctgatgtcatcggtcattccaaactggcaactactttgaagaaaaacacatgta

SEQ ID NO: 691 - DNA, 122 bp, Homo sapiens
  misc_feature (61)..(62): /note="This region represents a CpG dinucleotide"
  misc_feature (61)..(61): /note="Nucleotide may be methylated to form 5-methylcytosine"
aaacaagacatttgaaagcactgaaaatgatgagtttatgtatttctatctaaaacttaacgaggagattcggaggaattttctatcagattacaagagctaaatgtaatattgtatataaa

SEQ ID NO: 692 - DNA, 122 bp, Homo sapiens
  misc_feature (61)..(62): /note="This region represents a CpG dinucleotide"
  misc_feature (61)..(61): /note="Nucleotide may be methylated to form 5-methylcytosine"
ggggctgatgtggggcaaagagggaatggggccgccgggcctggatggtcgtcttgacggcgtcattgtcgccccttgtaggaaatccgccaaccggcccctagcctttcgccctcatcttc

SEQ ID NO: 693 - DNA, 122 bp, Homo sapiens
  misc_feature (61)..(62): /note="This region represents a CpG dinucleotide"
  misc_feature (61)..(61): /note="Nucleotide may be methylated to form 5-methylcytosine"
ttattattaaccacaatagtcttttctttcattatttcaacactcacctcttttttagaacgatcagatacaaggctgtcttcaccaactgggtaggtgtggatcaagaccaactcacattt

SEQ ID NO: 694 - DNA, 122 bp, Homo sapiens
  misc_feature (61)..(62): /note="This region represents a CpG dinucleotide"
  misc_feature (61)..(61): /note="Nucleotide may be methylated to form 5-methylcytosine"
agagggagaccccatctctacaaaaaatttaaaaaaaaattagcgacgcacagtggtacacgcctgcggtcccagctactcagaaggttatggtgggaagattgcttaagcccaggagatta

SEQ ID NO: 695 - DNA, 122 bp, Homo sapiens
  misc_feature (61)..(62): /note="This region represents a CpG dinucleotide"
  misc_feature (61)..(61): /note="Nucleotide may be methylated to form 5-methylcytosine"
aagtagtggaaaatgccttatattttggcaatattctgttgtattctctcctcgtcctcccgagaaatgatttcaaagcactttactatcattattttaggcttcattttatcaatcctcac

SEQ ID NO: 696 - DNA, 122 bp, Homo sapiens
  misc_feature (61)..(62): /note="This region represents a CpG dinucleotide"
  misc_feature (61)..(61): /note="Nucleotide may be methylated to form 5-methylcytosine"
tgggaaaccactgcaaatgatttactttgtgtcctttttgaagttttttctgtacatttacgagtgtgtgcctgtatttggccggatgtgtgattattagacaataattagatcaccacata

SEQ ID NO: 697 - DNA, 122 bp, Homo sapiens
  misc_feature (61)..(62): /note="This region represents a CpG dinucleotide"
  misc_feature (61)..(61): /note="Nucleotide may be methylated to form 5-methylcytosine"
ccaggtgcgcagccgaagcccagtgccaaggaggccggggacttgggtgcccgcgtacaccgaaaacagtctctgaggggtcctcagagcatctttccagcatgtttttaacagcagagaaa

SEQ ID NO: 698 - DNA, 122 bp, Homo sapiens
  misc_feature (61)..(62): /note="This region represents a CpG dinucleotide"
  misc_feature (61)..(61): /note="Nucleotide may be methylated to form 5-methylcytosine"
tgtgagtctctgtgggtgtatctttatgtgtctgtgtgtgtgtttgtatttatatgtctgcgtgtatctgtttctttgtctgtgtctctgcatgtgtctctgtgtgtgtctgcttctctgtg

SEQ ID NO: 699 - DNA, 122 bp, Homo sapiens
  misc_feature (61)..(62): /note="This region represents a CpG dinucleotide"
  misc_feature (61)..(61): /note="Nucleotide may be methylated to form 5-methylcytosine"
ctccatctggcaaccttcatttaatcccaaacaaagggcctcaatcccctgtacagcccacgttccatgggacaggatgggagctcagacgttcctctatagataaggaatgactcttcgga

SEQ ID NO: 700 - DNA, 122 bp, Homo sapiens
  misc_feature (61)..(62): /note="This region represents a CpG dinucleotide"
  misc_feature (61)..(61): /note="Nucleotide may be methylated to form 5-methylcytosine"
cacctgtagtcccagttacttaggaggctgaggtgggaggatcacttgagcccaggagttcgaggctgcagggagttatatcatgctactacactccagcctgggcactacagcaaggccct

SEQ ID NO: 701 - DNA, 122 bp, Homo sapiens
  misc_feature (61)..(62): /note="This region represents a CpG dinucleotide"
  misc_feature (61)..(61): /note="Nucleotide may be methylated to form 5-methylcytosine"
cagctaattttattttatttttgcagagatagggtctccctgacttgcccaggctggtctcggactcctgggctcaagcgaactcctgggctcctcctgccttggcctcccaaagcactggg

SEQ ID NO: 702 - DNA, 122 bp, Homo sapiens
  misc_feature (61)..(62): /note="This region represents a CpG dinucleotide"
  misc_feature (61)..(61): /note="Nucleotide may be methylated to form 5-methylcytosine"
ccgacgtcacgaacgtacaactgtaccgtcgcgagaggacgtgatgcgcccggtgattggcgccgccgctgcggctgcgcaggagacgacccccgcgggcgctcccacccccatctcgcgcg

SEQ ID NO: 703 - DNA, 122 bp, Homo sapiens
  misc_feature (61)..(62): /note="This region represents a CpG dinucleotide"
  misc_feature (61)..(61): /note="Nucleotide may be methylated to form 5-methylcytosine"
ggagggctcagggagaagtgagcagttgttttccctggctggagcgcggcgcggcggcggcgaggggggctgggacgctggccccgggccagggacacagtttttttttttttgttgtttaa

SEQ ID NO: 704 - DNA, 122 bp, Homo sapiens
  misc_feature (61)..(62): /note="This region represents a CpG dinucleotide"
  misc_feature (61)..(61): /note="Nucleotide may be methylated to form 5-methylcytosine"
gtagtgtccataggacgggaaaggcgtgtagtacgcggccaggttctgcgggctgctctccggcgggtagcacaccttgtcctgaggcacggcctcacttggccggggtagagccatcccgg

SEQ ID NO: 705 - DNA, 122 bp, Homo sapiens
  misc_feature (61)..(62): /note="This region represents a CpG dinucleotide"
  misc_feature (61)..(61): /note="Nucleotide may be methylated to form 5-methylcytosine"
atataaataaaaatattaaagtacaaaagttggctgggcatgttagtgcaaacctataatcgcagctacttgggtagctgaggtaccagaatcgcttgaaccagggagatggagtttgcttg

SEQ ID NO: 706 - DNA, 122 bp, Homo sapiens
  misc_feature (61)..(62): /note="This region represents a CpG dinucleotide"
  misc_feature (61)..(61): /note="Nucleotide may be methylated to form 5-methylcytosine"
ggtcctcagctccgtgccacaccagtctggcctgtaggcccgccccagcccgcccccgcccgcccccggctccgccctcaggctggcacccactccgcccccagcccaaccctcgggcccac

SEQ ID NO: 707 - DNA, 122 bp, Homo sapiens
  misc_feature (61)..(62): /note="This region represents a CpG dinucleotide"
  misc_feature (61)..(61): /note="Nucleotide may be methylated to form 5-methylcytosine"
acagcccagcgacctcgccccgccctcccgcagccggccccgccctcccgcagccggccccgccctcccgctcgcggccccgcccccaggagcttggccctccgccaaccacaccgtctggc

SEQ ID NO: 708 - DNA, 122 bp, Homo sapiens
  misc_feature (61)..(62): /note="This region represents a CpG dinucleotide"
  misc_feature (61)..(61): /note="Nucleotide may be methylated to form 5-methylcytosine"
gagagctgcttgtttaaaagtgtgtagcagaggctcgctgtcttcctcctgcttcagctacgtaagtcgtgcctgcttcttcctcaccttctgccatgattgtaagtttcctgaggcctccc

SEQ ID NO: 709 - DNA, 122 bp, Homo sapiens
  misc_feature (61)..(62): /note="This region represents a CpG dinucleotide"
  misc_feature (61)..(61): /note="Nucleotide may be methylated to form 5-methylcytosine"
tcgttgatgatcctcataacatttaggccagcaatagttccagcgtctttggttgcttggcgttgggcatcattaaaataggctggtacagtaacaactgcatgggtaacctaaaaggataa

SEQ ID NO: 710 - DNA, 122 bp, Homo sapiens
  misc_feature (61)..(62): /note="This region represents a CpG dinucleotide"
  misc_feature (61)..(61): /note="Nucleotide may be methylated to form 5-methylcytosine"
ggggggccggccctccggccctctgctgcccgagggttcctcgcaggctggagctgacggcgctggagcgcgtggtacgaatctcagccaagcccaccaagcggctgcaggaggcgctgcag

SEQ ID NO: 711 - DNA, 122 bp, Homo sapiens
  misc_feature (61)..(62): /note="This region represents a CpG dinucleotide"
  misc_feature (61)..(61): /note="Nucleotide may be methylated to form 5-methylcytosine"
gtcacctgggtgctcgcgtcctccccgcgcggcggacagcccgggcgcccttcctctctgcgggactgcaggtctatccgctaagcgcgcgtgaccaaaaacggctctcagcgggtcccagc

SEQ ID NO: 712 - DNA, 122 bp, Homo sapiens
  misc_feature (61)..(62): /note="This region represents a CpG dinucleotide"
  misc_feature (61)..(61): /note="Nucleotide may be methylated to form 5-methylcytosine"
gtgcttggtgtcagtctgcaccagttatgtccttaagggagggggacaaggtgctgcaagcgaagaaaccaaaatggagtctgtcccgctctctcagctaagagcgagtcaatcaggttaaa

SEQ ID NO: 713 - DNA, 122 bp, Homo sapiens
  misc_feature (61)..(62): /note="This region represents a CpG dinucleotide"
  misc_feature (61)..(61): /note="Nucleotide may be methylated to form 5-methylcytosine"
atgtgaatttggaggtaaggacacgttctacactcttggacccagacaaatttggtctcacgtgattggatcagagggacaacacttgtggtctcatgaagcgccaaggccttcttggttcc

SEQ ID NO: 714 - DNA, 122 bp, Homo sapiens
  misc_feature (61)..(62): /note="This region represents a CpG dinucleotide"
  misc_feature (61)..(61): /note="Nucleotide may be methylated to form 5-methylcytosine"
gaggaatattagactcggaggagtctgcgcgcttttctcctccccgcgcctcccggtcgccgcgggttcaccgctcagtccccgcgctcgctccgcaccccacccacttcctgtgctcgccc

SEQ ID NO: 715 - DNA, 122 bp, Homo sapiens
  misc_feature (61)..(62): /note="This region represents a CpG dinucleotide"
  misc_feature (61)..(61): /note="Nucleotide may be methylated to form 5-methylcytosine"
aaagtgtcccctagtgccaggtaaagtgcctcatatttgcaatcccagcacttctggagacggagataggaggatctcatgagcccaggagttcaagaccagcctgggtaacatggcaaaac

SEQ ID NO: 716 - DNA, 122 bp, Homo sapiens
  misc_feature (61)..(62): /note="This region represents a CpG dinucleotide"
  misc_feature (61)..(61): /note="Nucleotide may be methylated to form 5-methylcytosine"
caaggctgggcgaggggagccaaagacgggtggtgggagccgaggtcggccgagaggaaccggaaaagccaaggccaatgggaggagccgaggccaggcgggaggagccgagcagggccgaa

SEQ ID NO: 717 - DNA, 122 bp, Homo sapiens
  misc_feature (61)..(62): /note="This region represents a CpG dinucleotide"
  misc_feature (61)..(61): /note="Nucleotide may be methylated to form 5-methylcytosine"
gtccttttaataaatgctatgtccactttctagtcagactgaaagttccactaaataatacgtttttttatacctggagaagacgttgatgtattttctcaaatccattccatgttttcacc

SEQ ID NO: 718 - DNA, 122 bp, Homo sapiens
  misc_feature (61)..(62): /note="This region represents a CpG dinucleotide"
  misc_feature (61)..(61): /note="Nucleotide may be methylated to form 5-methylcytosine"
tgggtgtcacacctaggtgtctgccagcgagttttcctgtagtttctgttctttggcatccgtggactcttttacctgtggctcgtcctctttccttaattccaggaaactaattttcatga

SEQ ID NO: 719 - DNA, 122 bp, Homo sapiens
  misc_feature (61)..(62): /note="This region represents a CpG dinucleotide"
  misc_feature (61)..(61): /note="Nucleotide may be methylated to form 5-methylcytosine"
aagaaattttagggaaaggacgcaaaccttcttgaaaggtcagaaggttttgcatagcttcggggaagaataagcagaaggcagctgttctaccctgaggcagagggtgaggagtaggtaca

SEQ ID NO: 720 - DNA, 122 bp, Homo sapiens
  misc_feature (61)..(62): /note="This region represents a CpG dinucleotide"
  misc_feature (61)..(61): /note="Nucleotide may be methylated to form 5-methylcytosine"
cagatttctaggatagaaactcagtatccaagctcaggcttggcagactgaggtgggcaccgtccccaggattgcagtgtggattagaggtttcaaccccaatcatattcaacagctccctt

SEQ ID NO: 721 - DNA, 122 bp, Homo sapiens
  misc_feature (61)..(62): /note="This region represents a CpG dinucleotide"
  misc_feature (61)..(61): /note="Nucleotide may be methylated to form 5-methylcytosine"
acctggcgggccctagggtggagacccgggcggggttggggggtactcgcgaatctgctgcgggcgcagcgttggggtgtctggtccctgcccagccggtaggccgcgtccgccgtcccact

SEQ ID NO: 722 - DNA, 122 bp, Homo sapiens
  misc_feature (61)..(62): /note="This region represents a CpG dinucleotide"
  misc_feature (61)..(61): /note="Nucleotide may be methylated to form 5-methylcytosine"
tcaaatctttgcccacatggagaaacataacatgcacagtcacacatgcacaaacatgcacgcaaacacacatccgtacattcacacacaacatacctctcactcactgcagcgaaagggac

SEQ ID NO: 723 - DNA, 122 bp, Homo sapiens
  misc_feature (61)..(62): /note="This region represents a CpG dinucleotide"
  misc_feature (61)..(61): /note="Nucleotide may be methylated to form 5-methylcytosine"
agcgcctcctggctaagcggcctcaccaactcggttgcgcaaaccgcgctcctggctgagcggccgctgtgcgcgccccgcctgctggaccacttcatctgtgagctgccggcgttgctcaa

SEQ ID NO: 724 - DNA, 122 bp, Homo sapiens
  misc_feature (61)..(62): /note="This region represents a CpG dinucleotide"
  misc_feature (61)..(61): /note="Nucleotide may be methylated to form 5-methylcytosine"
acatgtacgtaaggaaaaatcagtttaaaaacttatagcaaacacagtagctttctaccccgctcttctccaccccagatcctgccctttagaggagagctgcacgcgcttctttgcatctg

SEQ ID NO: 725 - DNA, 122 bp, Homo sapiens
  misc_feature (61)..(62): /note="This region represents a CpG dinucleotide"
  misc_feature (61)..(61): /note="Nucleotide may be methylated to form 5-methylcytosine"
cggtgagagggggcggggggcggggccgcggtgagatggggcggggccgcggtgagggggcggggccgcggtgagagggggcgggaccgcggtgagagggggcgggaccgcggtgagagggg

SEQ ID NO: 726 - DNA, 122 bp, Homo sapiens
  misc_feature (61)..(62): /note="This region represents a CpG dinucleotide"
  misc_feature (61)..(61): /note="Nucleotide may be methylated to form 5-methylcytosine"
acttcctgggttttaccagcccctaaatttactcacttaaaaaatttaattacatagacacgaatcattcattgtagttgctaaatattggtagcaactaactcgttgccttttgttggaat

SEQ ID NO: 727 - DNA, 122 bp, Homo sapiens
  misc_feature (61)..(62): /note="This region represents a CpG dinucleotide"
  misc_feature (61)..(61): /note="Nucleotide may be methylated to form 5-methylcytosine"
caaatctgtggcttctgtgggagttggggccacgacagggccacacggctcctccagctccgagggagacggggccgcgcggctcctccagctctgagggagacggggccgcgcggctcctc

SEQ ID NO: 728 - DNA, 122 bp, Homo sapiens
  misc_feature (61)..(62): /note="This region represents a CpG dinucleotide"
  misc_feature (61)..(61): /note="Nucleotide may be methylated to form 5-methylcytosine"
aagggttcctggcaaaaggggccattgtcagaggctctggttgcatgaccatttggagttcgatggcctgaaggcaaggacaaacaaaccgggttattagaaaacatatatcaaagcaaaac

SEQ ID NO: 729 - DNA, 122 bp, Homo sapiens
  misc_feature (61)..(62): /note="This region represents a CpG dinucleotide"
  misc_feature (61)..(61): /note="Nucleotide may be methylated to form 5-methylcytosine"
gcgctccaggagcagttgtgcctccagccggctcaccttcaggaagcacctgtggcgggccgcgtcacccactcgggaccccggagaccaagtccgctcttctgcacgtaaaccctgcctcc

SEQ ID NO: 730 - DNA, 122 bp, Homo sapiens
  misc_feature (61)..(62): /note="This region represents a CpG dinucleotide"
  misc_feature (61)..(61): /note="Nucleotide may be methylated to form 5-methylcytosine"
aggtgggcgtcgtacgtcgttacgcagcgcggttgctgggcacctcgactatcacctgaccgtagtaatatctcccgctacgcgcgttgtgaccaatgctgcatacaggagatgagggagga

SEQ ID NO: 731 - DNA, 122 bp, Homo sapiens
  misc_feature (61)..(62): /note="This region represents a CpG dinucleotide"
  misc_feature (61)..(61): /note="Nucleotide may be methylated to form 5-methylcytosine"
agaatttgcccttccatatgtgcttccaaacagctgtgcttattccgttcagaaataaaacgatcaatagaggagacatgtggcctgggtacagagaaaatatgatgtactttatttctcaa

SEQ ID NO: 732 - DNA, 122 bp, Homo sapiens
  misc_feature (61)..(62): /note="This region represents a CpG dinucleotide"
  misc_feature (61)..(61): /note="Nucleotide may be methylated to form 5-methylcytosine"
tcttttatcagtctcttttacagctctagggatgtaccatgatccatgtgttttcaacaccgtatttgcgctgaccttatataatatgccaacgaatgaaggtttcacaatgaaggatcaaa

SEQ ID NO: 733 - DNA, 122 bp, Homo sapiens
  misc_feature (61)..(62): /note="This region represents a CpG dinucleotide"
  misc_feature (61)..(61): /note="Nucleotide may be methylated to form 5-methylcytosine"
gctttactcaaagtgtactgaattaaatgttaatctcatccagaagtaccttcacatcaacgtctaaactagtgttcgatcaaatatctgaatactatgagctagccatgttgacacgaaaa

SEQ ID NO: 734 - DNA, 122 bp, Homo sapiens
  misc_feature (61)..(62): /note="This region represents a CpG dinucleotide"
  misc_feature (61)..(61): /note="Nucleotide may be methylated to form 5-methylcytosine"
gcttaagtgctggggtttgccttgcttgcggcgagacatggtgggctgcggggcgggcggcggcggcggcggcggcggcggcgggcggacgacggctcggttcacatcgggagagccgggtt

SEQ ID NO: 735 - DNA, 122 bp, Homo sapiens
  misc_feature (61)..(62): /note="This region represents a CpG dinucleotide"
  misc_feature (61)..(61): /note="Nucleotide may be methylated to form 5-methylcytosine"
aataggaactttgcaaatgtgattaaattaatgaccttcagattgggggtgggagggcagcggttatcctggattatcttggtgggccaatgtcatcacaagagtccttgtaagaggaaggc

SEQ ID NO: 736 - DNA, 122 bp, Homo sapiens
  misc_feature (61)..(62): /note="This region represents a CpG dinucleotide"
  misc_feature (61)..(61): /note="Nucleotide may be methylated to form 5-methylcytosine"
actactagcgtggtgccgccgctgctggccaacctgcgcggaccagcgctctggctgccgcgcagccactgcacggcccagctgtgcgcatcgctggctctgggttccgccgaatgcgtcct

SEQ ID NO: 737 - DNA, 122 bp, Homo sapiens
  misc_feature (61)..(62): /note="This region represents a CpG dinucleotide"
  misc_feature (61)..(61): /note="Nucleotide may be methylated to form 5-methylcytosine"
gctaagcggcctcaccaactcggttgcgcaaaccgcgctcctggctgagcggccgctgtgcgcgccccgcctgctggaccacttcatctgtgagctgccggcgttgctcaagctggcctgcg

SEQ ID NO: 738 - DNA, 122 bp, Homo sapiens
  misc_feature (61)..(62): /note="This region represents a CpG dinucleotide"
  misc_feature (61)..(61): /note="Nucleotide may be methylated to form 5-methylcytosine"
atctgattcttccaatacaccaaggcaagaacccgggatacagaaagccctctgtccttacgacaaagaagaggatctaattgagctggttaacataagccgcttataggcagcaaaactaa

SEQ ID NO: 739 - DNA, 122 bp, Homo sapiens
  misc_feature (61)..(62): /note="This region represents a CpG dinucleotide"
  misc_feature (61)..(61): /note="Nucleotide may be methylated to form 5-methylcytosine"
agggagagatgagatcttaagcctctgctcattcattgggtgctgagtagcaatgcctcccgcgggccacaggaacttatctccgccgattgttacagctggaaggatggggagatagcacc

SEQ ID NO: 740 - DNA, 122 bp, Homo sapiens
  misc_feature (61)..(62): /note="This region represents a CpG dinucleotide"
  misc_feature (61)..(61): /note="Nucleotide may be methylated to form 5-methylcytosine"
ttcattcaactgatgatttactgaacatgccacgtaccaggcactgtcctaggcactgggcgtacagcagtgagcaaaacacagtacctcatttcctggagttcacatgcccatggagcaag

SEQ ID NO: 741 - DNA, 122 bp, Homo sapiens
  misc_feature (61)..(62): /note="This region represents a CpG dinucleotide"
  misc_feature (61)..(61): /note="Nucleotide may be methylated to form 5-methylcytosine"
ctcgctcccgcagctcctctggtacccgccctcgtacctggcgcatctgggcctcggcggcgccgccctcctgccttcgcagctgctcccggaagcgcgcaacctgctccagcagcgcgtcc

SEQ ID NO: 742 - DNA, 122 bp, Homo sapiens
  misc_feature (61)..(62): /note="This region represents a CpG dinucleotide"
  misc_feature (61)..(61): /note="Nucleotide may be methylated to form 5-methylcytosine"
cccaaagggagtaggaggaggtactctctccaacctggtaagccaggctgctaaaatctacgcctctggccgtaaacctccaacagcagtaacacaatggactgtttaaaggttattttatt

SEQ ID NO: 743 - DNA, 122 bp, Homo sapiens
  misc_feature (61)..(62): /note="This region represents a CpG dinucleotide"
  misc_feature (61)..(61): /note="Nucleotide may be methylated to form 5-methylcytosine"
gtggcacagaattagaatgaaaggaaataaagatctctaccccttcccaagcccacaacacgcaaccttaaacttctactgaaatgttgtctttgtcacagccgagaccttgaagctttctc

SEQ ID NO: 744 - DNA, 122 bp, Homo sapiens
  misc_feature (61)..(62): /note="This region represents a CpG dinucleotide"
  misc_feature (61)..(61): /note="Nucleotide may be methylated to form 5-methylcytosine"
agggcatttttaggttcacaacaaaattgagcagaaagtacagttttcatattacccctgcgcccacccacctccagcaagcagcaatctgttcgctttcaagttttatttatttatttatt

SEQ ID NO: 745 - DNA, 122 bp, Homo sapiens
  misc_feature (61)..(62): /note="This region represents a CpG dinucleotide"
  misc_feature (61)..(61): /note="Nucleotide may be methylated to form 5-methylcytosine"
gattttttcatatgtggaaatctattacatgtaatacaaaacaaacatgtagtttgaaggcggtcagatttctttgagaaatctttgtagagttaattttatggaaattaaaatcagaatta

SEQ ID NO: 746 - DNA, 122 bp, Homo sapiens
  misc_feature (61)..(62): /note="This region represents a CpG dinucleotide"
  misc_feature (61)..(61): /note="Nucleotide may be methylated to form 5-methylcytosine"
tgtcttttatttcagcactttagcatttcttgcaggggcaggtctagcggttacaaacttcgttgatttttattgtctggaaatatatttattttgctctcatttttgaaagataattttac

SEQ ID NO: 747 - DNA, 122 bp, Homo sapiens
  misc_feature (61)..(62): /note="This region represents a CpG dinucleotide"
  misc_feature (61)..(61): /note="Nucleotide may be methylated to form 5-methylcytosine"
acaaaactgtcataaaaataatcacttggctcttagttttagaaggctaataagcctgaccgttctgtttagtgctttattattattaatttcaccattatgctgcatcccttagggattcc

SEQ ID NO: 748 - DNA, 122 bp, Homo sapiens
  misc_feature (61)..(62): /note="This region represents a CpG dinucleotide"
  misc_feature (61)..(61): /note="Nucleotide may be methylated to form 5-methylcytosine"
ttaccttctgatcacccttggctttatttttaggtaacaccaagaaggacgccatgagagcgaaggccattgggtaaccaccctttgctctcgcgctgcgcgtctccctgccatcaaccgcc

SEQ ID NO: 749 - DNA, 122 bp, Homo sapiens
  misc_feature (61)..(62): /note="This region represents a CpG dinucleotide"
  misc_feature (61)..(61): /note="Nucleotide may be methylated to form 5-methylcytosine"
ggtgggaggatcgcttgagcccaataggtggaggctccgtgagctgagatagcgccactgcgctcctgcctgggcgacagagtgagaacctgactcaaaacaaagaaaaaaggaagaaaaga

SEQ ID NO: 750 - DNA, 122 bp, Homo sapiens
  misc_feature (61)..(62): /note="This region represents a CpG dinucleotide"
  misc_feature (61)..(61): /note="Nucleotide may be methylated to form 5-methylcytosine"
acacacaaactaactcaatctctgctttaagtttctattgtccaatttttctgatttatacgagaattattttcagctttagaaaatcctggtctttggtcattagaagtttattattatgg

SEQ ID NO: 751 - DNA, 122 bp, Homo sapiens
  misc_feature (61)..(62): /note="This region represents a CpG dinucleotide"
  misc_feature (61)..(61): /note="Nucleotide may be methylated to form 5-methylcytosine"
agagggtccctgctcgtcttacctatgtaataaaagaaaaaagtccacacatgtcagaaacgggtttggcaataactctcttaggttggtgcaaaagtaattgcagtttttgccattaaaag

SEQ ID NO: 752 - DNA, 122 bp, Homo sapiens
  misc_feature (61)..(62): /note="This region represents a CpG dinucleotide"
  misc_feature (61)..(61): /note="Nucleotide may be methylated to form 5-methylcytosine"
ctccctcattcagcttgttgatcagcttcaccttagttaaagcattcatctccgcgggctcgcgctcaacgttcaagtatcagtgccggggcgaggcagcccccgtgtgatacttcgtggcg

SEQ ID NO: 753 - DNA, 122 bp, Homo sapiens
  misc_feature (61)..(62): /note="This region represents a CpG dinucleotide"
  misc_feature (61)..(61): /note="Nucleotide may be methylated to form 5-methylcytosine"
caccgcccccgcacccacgacccgcgtggtcccagcccctccaccctcttcacgcaccctcgcacccttttgtgcgaccccgtgccctctccgggctgccaacccctgccacccaggtgcca

SEQ ID NO: 754 - DNA, 122 bp, Homo sapiens
  misc_feature (61)..(62): /note="This region represents a CpG dinucleotide"
  misc_feature (61)..(61): /note="Nucleotide may be methylated to form 5-methylcytosine"
tacaatcccagcgctggggcctggggcgtccggggggcggcctttgagcttcccggataccgctcgcctgctcccggagctgttcggccgccggctgcccgggtcgtgcactttcagtaggg

SEQ ID NO: 755 - DNA, 122 bp, Homo sapiens
  misc_feature (61)..(62): /note="This region represents a CpG dinucleotide"
  misc_feature (61)..(61): /note="Nucleotide may be methylated to form 5-methylcytosine"
gaaattaggagatcagggttttggtcccagttttctcttaattagcaaagcctttatttccgttagaggaaggaatgacttcgacatgtgttttctaaattgagagagagaacagggttgtt

SEQ ID NO: 756 - DNA, 122 bp, Homo sapiens
  misc_feature (61)..(62): /note="This region represents a CpG dinucleotide"
  misc_feature (61)..(61): /note="Nucleotide may be methylated to form 5-methylcytosine"
ctggagctaggaataggtcatatggtccctgtcatcaggatcatgttgcatacatatgaccgtgaagccaggtaggaacatctgtgattctaggacacagtgatcggggccatgacacagtt

SEQ ID NO: 757 - DNA, 122 bp, Homo sapiens
  misc_feature (61)..(62): /note="This region represents a CpG dinucleotide"
  misc_feature (61)..(61): /note="Nucleotide may be methylated to form 5-methylcytosine"
cgccaccatggctccctcctgctcgcccgccgagccgcctaccgccgccgttgccgctgccgccgccccgtccccgccgaactgctcctccgacatagtgctagtgtctccgccgctgccgc

SEQ ID NO: 758 - DNA, 122 bp, Homo sapiens
  misc_feature (61)..(62): /note="This region represents a CpG dinucleotide"
  misc_feature (61)..(61): /note="Nucleotide may be methylated to form 5-methylcytosine"
tcaagaaagttgttttgagatccctaagaccaaaagacttagtgaaagttgttttgagatcgagtgtgctgcttgcgaaaatagctcctcaaggtgtcactcttgagtcagttcttctcaca

SEQ ID NO: 759 - DNA, 122 bp, Homo sapiens
  misc_feature (61)..(62): /note="This region represents a CpG dinucleotide"
  misc_feature (61)..(61): /note="Nucleotide may be methylated to form 5-methylcytosine"
ggtcggccccggagcttgggggggatgtgcagctaacggtcccgtcgggcgggctttcctcgggccgagcgcgcaggacgtgcgccgcagctatggagtgtcccgggagacggcgggcatga

SEQ ID NO: 760 - DNA, 122 bp, Homo sapiens
  misc_feature (61)..(62): /note="This region represents a CpG dinucleotide"
  misc_feature (61)..(61): /note="Nucleotide may be methylated to form 5-methylcytosine"
acattggtaaaggtgagcagcatgtcgcatatgtcaccagccacttcatctttatgataccgtaacatagttgtgaaaactgctatgttgaatccaggaatctgctacagaggttattcttc

SEQ ID NO: 761 - DNA, 122 bp, Homo sapiens
  misc_feature (61)..(62): /note="This region represents a CpG dinucleotide"
  misc_feature (61)..(61): /note="Nucleotide may be methylated to form 5-methylcytosine"
cagcatgggggaaaccggctccgtgatccaatcacttcccaccatgtccctccctcaacacgtggggattataattcgagttaagatttgtgtggagacacagagccaaaccatatcagatg

SEQ ID NO: 762 - DNA, 122 bp, Homo sapiens
  misc_feature (61)..(62): /note="This region represents a CpG dinucleotide"
  misc_feature (61)..(61): /note="Nucleotide may be methylated to form 5-methylcytosine"
gagtttatttttttgctcttttttgttctattgatctgtgtgtctgtctcccaatacgaccgtttaactgttgtgcctctatagtaagtctttaaaaagctaatgtgattacccttatttta

SEQ ID NO: 763 - DNA, 122 bp, Homo sapiens
  misc_feature (61)..(62): /note="This region represents a CpG dinucleotide"
  misc_feature (61)..(61): /note="Nucleotide may be methylated to form 5-methylcytosine"
ccggctcgggtctccgcggccgccgcgccgccgacgtgtccggcttacgacatcagcgcgcgccccgcccctggccccgcccctcggctcgtcggcccagacgcgttctctttcagcccttc

SEQ ID NO: 764 - DNA, 122 bp, Homo sapiens
  misc_feature (61)..(62): /note="This region represents a CpG dinucleotide"
  misc_feature (61)..(61): /note="Nucleotide may be methylated to form 5-methylcytosine"
cgcctccctggttcaagtgatccctcctgcctcagcctcctgagtagctgggattacaggcgtccaccatcactccaggttatttttgtgtttttaggagagatggggtttcaccatgttgg

SEQ ID NO: 765 - DNA, 122 bp, Homo sapiens
  misc_feature (61)..(62): /note="This region represents a CpG dinucleotide"
  misc_feature (61)..(61): /note="Nucleotide may be methylated to form 5-methylcytosine"
tgttgtttgcgttaatgaattaaagctccatagggtcttctcgtcttgttatactatgcccgcctcttcacgggcaggtcaatttcactggttgaaagtaagagacagctgaaccctcgtgg

SEQ ID NO: 766 - DNA, 122 bp, Homo sapiens
  misc_feature (61)..(62): /note="This region represents a CpG dinucleotide"
  misc_feature (61)..(61): /note="Nucleotide may be methylated to form 5-methylcytosine"
agtgggggcagccaggccccaggaacggagtgcggagagattctgtggtccagtgcgggccggagggcggtggaggagccgggggcgatgccgcggccggggaagagctcgtacagcgacca

SEQ ID NO: 767 - DNA, 122 bp, Homo sapiens
  misc_feature (61)..(62): /note="This region represents a CpG dinucleotide"
  misc_feature (61)..(61): /note="Nucleotide may be methylated to form 5-methylcytosine"
gggagacactgcctgggggtcctgcaggggtgctgggcagcgtcttggcgagggcagagccgcagggcgactccggagcccggcaagtttgtagcgggcaccgcacctcccagagctggagc

SEQ ID NO: 768 - DNA, 122 bp, Homo sapiens
  misc_feature (61)..(62): /note="This region represents a CpG dinucleotide"
  misc_feature (61)..(61): /note="Nucleotide may be methylated to form 5-methylcytosine"
accggggggtgatattactccccgcatcgcggggggcgtccgcccccttgcgacgggaatcgtaatacccaggtggggagagggggttgatattactccccgatttttcctaggatcttttc

SEQ ID NO: 769 - DNA, 122 bp, Homo sapiens
  misc_feature (61)..(62): /note="This region represents a CpG dinucleotide"
  misc_feature (61)..(61): /note="Nucleotide may be methylated to form 5-methylcytosine"
tctcgcggcgcaggcggcggcggcagaggtggggtcgcgcagcggaggcagctcgagcttcgggatgcgcgctcgcttcttgggctcctcgctcgatcttactgcccccttttttctctccc

SEQ ID NO: 770 - DNA, 122 bp, Homo sapiens
  misc_feature (61)..(62): /note="This region represents a CpG dinucleotide"
  misc_feature (61)..(61): /note="Nucleotide may be methylated to form 5-methylcytosine"
gggttctgaaccatgatcttaccctgcttctattatactataccatacatgctacgtgcacggaggccctggccagagatcacctgatgctgatagcaccacgattagctagaaacactctc

SEQ ID NO: 771 - DNA, 122 bp, Homo sapiens
  misc_feature (61)..(62): /note="This region represents a CpG dinucleotide"
  misc_feature (61)..(61): /note="Nucleotide may be methylated to form 5-methylcytosine"
ggccgcggcggggcaggcgtaggctgcgcaggcaggggtggccgcgggtgctgagccagtcgccgccgcgcaggcgggcgctggagtctcagctacctggcgcgaccgccagcagcacccag

SEQ ID NO: 772 - DNA, 122 bp, Homo sapiens
  misc_feature (61)..(62): /note="This region represents a CpG dinucleotide"
  misc_feature (61)..(61): /note="Nucleotide may be methylated to form 5-methylcytosine"
agaagaagaagaagaagaagaagaagaagaagaagaagaagaagaagaagaagaagaaggcggccaaatagaagcaaatggaaccaagacgtagggagagagaacctacctgatgacatagt

SEQ ID NO: 773 - DNA, 122 bp, Homo sapiens
  misc_feature (61)..(62): /note="This region represents a CpG dinucleotide"
  misc_feature (61)..(61): /note="Nucleotide may be methylated to form 5-methylcytosine"
atcctttcagtccgttgggtggtgaccagccaatgggccggatggataggacgctcctcccggagagtagtgagacccctggtgcggggcgattggcggcgggagcgatgagtggcagccgc

SEQ ID NO: 774 - DNA, 122 bp, Homo sapiens
  misc_feature (61)..(62): /note="This region represents a CpG dinucleotide"
  misc_feature (61)..(61): /note="Nucleotide may be methylated to form 5-methylcytosine"
cctggcctttcctggcaggaccctgagtgacccaagtgtcctcctgttctccctgggtcccggctcctggctcccgtgccctgctggccttctttgacaattgcagtgtttgctgttcatct

SEQ ID NO: 775 - DNA, 122 bp, Homo sapiens
  misc_feature (61)..(62): /note="This region represents a CpG dinucleotide"
  misc_feature (61)..(61): /note="Nucleotide may be methylated to form 5-methylcytosine"
ttatttttattttgtagagactgggtcccgctctcctggtctctcaaagtgcgatccgcccgcctcgggctcccaaagtgcgtgagccgccgcacccggccataaatcttaaacctaacgtg

SEQ ID NO: 776 - DNA, 122 bp, Homo sapiens
  misc_feature (61)..(62): /note="This region represents a CpG dinucleotide"
  misc_feature (61)..(61): /note="Nucleotide may be methylated to form 5-methylcytosine"
agtttaataccagcctggggcaacatggtgaaactccgtgtctacaaaaaattagctaggcgtgatggcgtgcacctatacctcctactcgggaatcatctgagccggggaagtcaaagtca

SEQ ID NO: 777 - DNA, 122 bp, Homo sapiens
  misc_feature (61)..(62): /note="This region represents a CpG dinucleotide"
  misc_feature (61)..(61): /note="Nucleotide may be methylated to form 5-methylcytosine"
tgctacctcctgaccttgacgggcaactcggcgctggtgctgctggcggtgcgcgacccgcgcctgcacacgcccatgtactacttcctctgccacctggccttggtagacgcgggcttcac

SEQ ID NO: 778 - DNA, 122 bp, Homo sapiens
  misc_feature (61)..(62): /note="This region represents a CpG dinucleotide"
  misc_feature (61)..(61): /note="Nucleotide may be methylated to form 5-methylcytosine"
tcatgagtagctgagactactattttattgttaatagagacaaagtctcgctatcctgcccgggctggtctcaaattactgggctcaagtgatccttctgtcttggtctaccaaagtgctgg

SEQ ID NO: 779 - DNA, 122 bp, Homo sapiens
  misc_feature (61)..(62): /note="This region represents a CpG dinucleotide"
  misc_feature (61)..(61): /note="Nucleotide may be methylated to form 5-methylcytosine"
tcatgttacggcaaaccttaagctgaatgaacaacttttcttctcttgaatatatcttaacgccaaattttgagtgcttttttgttacccatcctcatatgtcccagctagaaagaatcctg

SEQ ID NO: 780 - DNA, 122 bp, Homo sapiens
  misc_feature (61)..(62): /note="This region represents a CpG dinucleotide"
  misc_feature (61)..(61): /note="Nucleotide may be methylated to form 5-methylcytosine"
tcagggttggaggaagccggacaaagatgaatgggattcagagcctgaactcaaggtcaacgtcttctgaatcacaaagagctggtgggtcagtctgggagaagaaagaaaattctgcgcca

SEQ ID NO: 781 - DNA, 122 bp, Homo sapiens
  misc_feature (61)..(62): /note="This region represents a CpG dinucleotide"
  misc_feature (61)..(61): /note="Nucleotide may be methylated to form 5-methylcytosine"
ataggtttagcctgggaaatagaaagcaaggaaattgctcagggaaacttttcggttctgcgacgcatgcgttcagcctccaagaaagtggcaaatacggctgcgcgaattggcggcccggc

SEQ ID NO: 782 - DNA, 122 bp, Homo sapiens
  misc_feature (61)..(62): /note="This region represents a CpG dinucleotide"
  misc_feature (61)..(61): /note="Nucleotide may be methylated to form 5-methylcytosine"
aatatgcttttataattttattctatgtagccaatttgttatcactgttgtgtgtgtgggcgcatgtgtgtgtgcacatgttttgatggtttatatgtaaagttttttggctggcttactac

SEQ ID NO: 783 - DNA, 122 bp, Homo sapiens
  misc_feature (61)..(62): /note="This region represents a CpG dinucleotide"
  misc_feature (61)..(61): /note="Nucleotide may be methylated to form 5-methylcytosine"
tgggagacagggacagatcaggcattagattctcctaaggagtgtgcaacctagatccttcgcatgcacagttcacaatagggttcatgctcctgtaagaatctaatgtcgccgctgatctg

SEQ ID NO: 784 - DNA, 122 bp, Homo sapiens
  misc_feature (61)..(62): /note="This region represents a CpG dinucleotide"
  misc_feature (61)..(61): /note="Nucleotide may be methylated to form 5-methylcytosine"
agaggtggggaccctggggaggtggctgctcggagtctaggtgacggggcgagacggggccggtaggtggcgggaggggccgggccggagccggcgggagggccaggcccggaggcccccac

SEQ ID NO: 785 - DNA, 122 bp, Homo sapiens
  misc_feature (61)..(62): /note="This region represents a CpG dinucleotide"
  misc_feature (61)..(61): /note="Nucleotide may be methylated to form 5-methylcytosine"
aaagttatttatccaactcacttaattctccttaattacattattccagtaggatagccacgctgagctttgataaggtattataaaatgttccctgttttatttcctccccttcagtgttt

SEQ ID NO: 786 - DNA, 122 bp, Homo sapiens
  misc_feature (61)..(62): /note="This region represents a CpG dinucleotide"
  misc_feature (61)..(61): /note="Nucleotide may be methylated to form 5-methylcytosine"
cgagggcggggaggggagtgacagcagcaactagcgcgcgctggcaaaagcacagagtctcggaataggctaaacggccggcgcggaggggtggaggcaagagggggcggaggaggagttgc

SEQ ID NO: 787 - DNA, 122 bp, Homo sapiens
  misc_feature (61)..(62): /note="This region represents a CpG dinucleotide"
  misc_feature (61)..(61): /note="Nucleotide may be methylated to form 5-methylcytosine"
caggctggagtgcagtggtgggatcacaactcattgcagcatacaactcctgggctcaagcgatccaatctcccatctcagccctcccagtagcttggactataggcatgcaccaccacgcc

SEQ ID NO: 788 - DNA, 122 bp, Homo sapiens
  misc_feature (61)..(62): /note="This region represents a CpG dinucleotide"
  misc_feature (61)..(61): /note="Nucleotide may be methylated to form 5-methylcytosine"
atcctgattgtcactaaggctccacctaagtagaatcatacagtaagctgtcgtggataacgcagatgtcaggtgtattacagtgaataaaatgaaagaatagcctaatgtagatcgacccc

SEQ ID NO: 789 - DNA, 122 bp, Homo sapiens
  misc_feature (61)..(62): /note="This region represents a CpG dinucleotide"
  misc_feature (61)..(61): /note="Nucleotide may be methylated to form 5-methylcytosine"
tcttcccgagcgttttccgagttggcgcggggggtggaggcggggccatggagcgcgtcccggggaccgttgcatccggaggcggccgtcgtgcggctccttcccgcctcgagagtgaggtg

SEQ ID NO: 790 - DNA, 122 bp, Homo sapiens
  misc_feature (61)..(62): /note="This region represents a CpG dinucleotide"
  misc_feature (61)..(61): /note="Nucleotide may be methylated to form 5-methylcytosine"
ctcctccatcagctgagagctacttccactcaataaaactttgtactctttctccagtcccgcatgtgatccgattcttccggtacaccaaggcaagaacccgggatacagaaagccctctg

SEQ ID NO: 791 - DNA, 122 bp, Homo sapiens
  misc_feature (61)..(62): /note="This region represents a CpG dinucleotide"
  misc_feature (61)..(61): /note="Nucleotide may be methylated to form 5-methylcytosine"
ttcaggcctcacagtgaaatcaggacaagatattcctgcgtagtcctcattcccttgctgcgcttgtcagggaagtggagcacagggtaaagtttgaacttgaagttgggcagatctggatt

SEQ ID NO: 792 - DNA, 122 bp, Homo sapiens
  misc_feature (61)..(62): /note="This region represents a CpG dinucleotide"
  misc_feature (61)..(61): /note="Nucleotide may be methylated to form 5-methylcytosine"
gtgccgcggccgccggagacgtcccgccgccgcgatcgcccgcgctcgcctctgcctccccgcgccgctcctccactcaccaaggcacagccgccgagctcggcagacacagtcccgggcac

SEQ ID NO: 793 - DNA, 122 bp, Homo sapiens
  misc_feature (61)..(62): /note="This region represents a CpG dinucleotide"
  misc_feature (61)..(61): /note="Nucleotide may be methylated to form 5-methylcytosine"
tggtggtctggccattggcaacaacgatgtaaatcaattgctcagcattccttccagaggcgggacactgtaagcttggttatttcctaaggccagttcctggaactctttgagtaaaaggc

SEQ ID NO: 794 - DNA, 122 bp, Homo sapiens
  misc_feature (61)..(62): /note="This region represents a CpG dinucleotide"
  misc_feature (61)..(61): /note="Nucleotide may be methylated to form 5-methylcytosine"
gcttaggaagaagctgaggtgtacagaggatgacactcatccaaagtctcagaattgctacgtggcagagctgggattcacacccaaccagtctggctccaaagtctgtgcttttaaccccc

SEQ ID NO: 795 - DNA, 122 bp, Homo sapiens
  misc_feature (61)..(62): /note="This region represents a CpG dinucleotide"
  misc_feature (61)..(61): /note="Nucleotide may be methylated to form 5-methylcytosine"
cccttcctgcctttctctctggctgcggctgtttcctgcggggctggctgcagctcccggcggcgccctgtcctgtacctgtttcatgtccatcgtcggcaacccctggcttctaacacagc

SEQ ID NO: 796 - DNA, 122 bp, Homo sapiens
  misc_feature (61)..(62): /note="This region represents a CpG dinucleotide"
  misc_feature (61)..(61): /note="Nucleotide may be methylated to form 5-methylcytosine"
gaaaaatcgggtctgagggatccaaagccatgcaacaggcacaatgtcaatgggcaggaccgattcctgccgactggaccccacctcacggaaggagcgtgcttcatggcataaacaggccc

SEQ ID NO: 797 - DNA, 122 bp, Homo sapiens
  misc_feature (61)..(62): /note="This region represents a CpG dinucleotide"
  misc_feature (61)..(61): /note="Nucleotide may be methylated to form 5-methylcytosine"
tgtctcaaaaaacaaaaactgtgaccagctgcatgtctggcggctgtgtgtgtgaacccacgtgtgtgtttgtgtgtctaaatgagcagtgatatctagaggaataagtggggcaagatcaa

SEQ ID NO: 798 - DNA, 122 bp, Homo sapiens
  misc_feature (61)..(62): /note="This region represents a CpG dinucleotide"
  misc_feature (61)..(61): /note="Nucleotide may be methylated to form 5-methylcytosine"
gctccgcttctccgggttttagcggaagcctgcggggggcggggtaaccgcggaagccggcggccgtgggcgcgcgggttgggggctctcgcgccgctccgggctctccccccccccggctg

SEQ ID NO: 799 - DNA, 122 bp, Homo sapiens
  misc_feature (61)..(62): /note="This region represents a CpG dinucleotide"
  misc_feature (61)..(61): /note="Nucleotide may be methylated to form 5-methylcytosine"
aaatctttctggcttgttcttctgccactggttggagaaagctttatacttttaagttgtcggaggcatttgaactagaacgactccatcttgaataggggctgggtaaaataaggctgaga

SEQ ID NO: 800 - DNA, 122 bp, Homo sapiens
  misc_feature (61)..(62): /note="This region represents a CpG dinucleotide"
  misc_feature (61)..(61): /note="Nucleotide may be methylated to form 5-methylcytosine"
aatgatttgtttcgaatattgtacatacttgcatatcctgcaagaagccacggcaagaagcggcttcacagtgctttaatgtctcctcagtgtcttaatgctgcttccccaaaacaaaccag

SEQ ID NO: 801 - DNA, 122 bp, Homo sapiens
  misc_feature (61)..(62): /note="This region represents a CpG dinucleotide"
  misc_feature (61)..(61): /note="Nucleotide may be methylated to form 5-methylcytosine"
ttgtactgaagtacattccttttatacctaattcattgagcttttatcagagaaaaataacgaattgtgtcaaatgtttttctgtatctattgaaatgatcaatgtggtttttgtccttcat

SEQ ID NO: 802 - DNA, 122 bp, Homo sapiens
  misc_feature (61)..(62): /note="This region represents a CpG dinucleotide"
  misc_feature (61)..(61): /note="Nucleotide may be methylated to form 5-methylcytosine"
tttacagccaaatctgttgtgaaaagcattcagtacctagattgctttacattttatacacgcatacatacatgttgtgtgtatgtgtgtgcataagtttaaagcaagttgtatctctataa

SEQ ID NO: 803 - DNA, 122 bp, Homo sapiens
  misc_feature (61)..(62): /note="This region represents a CpG dinucleotide"
  misc_feature (61)..(61): /note="Nucleotide may be methylated to form 5-methylcytosine"
ggctcctggcctcgcctcagcggctgcaggctcttcgtcgcgggccgggctgcacgcgagcgccctccgggcagactttcgtcccccacccccgggagcgcggaaggctcactcgcagcgca

SEQ ID NO: 804 - DNA, 122 bp, Homo sapiens
  misc_feature (61)..(62): /note="This region represents a CpG dinucleotide"
  misc_feature (61)..(61): /note="Nucleotide may be methylated to form 5-methylcytosine"
ctgctgccaacactgagccgagccagggttgctgttcacatctacgcaggctgttggtgccgcggcagcatgctgtccttgagagcactgtggaatttgcagtgtgccgtacagattcagaa

SEQ ID NO: 805 - DNA, 122 bp, Homo sapiens
  misc_feature (61)..(62): /note="This region represents a CpG dinucleotide"
  misc_feature (61)..(61): /note="Nucleotide may be methylated to form 5-methylcytosine"
cgcacccgctggccactctgcgcacgcgcgccgggtgccccggcctaaggccgttgacctcgggttctccccggcacagtcgaatccacgccagggccctcaggccggtagctgtcctgcag

SEQ ID NO: 806 - DNA, 122 bp, Homo sapiens
  misc_feature (61)..(62): /note="This region represents a CpG dinucleotide"
  misc_feature (61)..(61): /note="Nucleotide may be methylated to form 5-methylcytosine"
gagccactggcaatcccagtgcagggatgagcgctgctgagaagggcgtgacaaacatgacgtacaagtgcagaattaacacactaatgagtgagccagcagtggggcaagagctggttcca

SEQ ID NO: 807 - DNA, 122 bp, Homo sapiens
  misc_feature (61)..(62): /note="This region represents a CpG dinucleotide"
  misc_feature (61)..(61): /note="Nucleotide may be methylated to form 5-methylcytosine"
agaatgaatgtgcatattcagcacactaagcactctaagagccgagagagcttcctgaaacgcgtgaaggaaaatgatcagaaaaagagggaagccaaagagaaaggtacctggattcaact

SEQ ID NO: 808 - DNA, 122 bp, Homo sapiens
  misc_feature (61)..(62): /note="This region represents a CpG dinucleotide"
  misc_feature (61)..(61): /note="Nucleotide may be methylated to form 5-methylcytosine"
ttgcccaggatggtcttgaactgtctctattatcttctaatcttgacttttttccttatacgctacaatactccaatgaatattcttgttgattttttttttcacacctaagtgtttctatt

SEQ ID NO: 809 - DNA, 122 bp, Homo sapiens
  misc_feature (61)..(62): /note="This region represents a CpG dinucleotide"
  misc_feature (61)..(61): /note="Nucleotide may be methylated to form 5-methylcytosine"
tattgtttgccaaattttattaaattttatatctgcatattcttgtcattcactgaactacgttatgagtattattctgattcttttcagttatttcacaaatcttcatttctttggggttc

SEQ ID NO: 810 - DNA, 122 bp, Homo sapiens
  misc_feature (61)..(62): /note="This region represents a CpG dinucleotide"
  misc_feature (61)..(61): /note="Nucleotide may be methylated to form 5-methylcytosine"
ggccggtcctcagctccgtgccacaccagtctggcctgtaggcccgccccagcccgcccccgcccgcccccggctccgccctcaggctggcacccactccgcccccagcccaaccctcgggc

SEQ ID NO: 811 - DNA, 122 bp, Homo sapiens
  misc_feature (61)..(62): /note="This region represents a CpG dinucleotide"
  misc_feature (61)..(61): /note="Nucleotide may be methylated to form 5-methylcytosine"
gaaacaaaaagccctgaaggcaaagtaaaaagtgtccggcactcagtaaagacatttgtgcgggcctctgcctctagggttgcaacatttctagagaaaaggtaaagcatctctaagcaaat

SEQ ID NO: 812 - DNA, 122 bp, Homo sapiens
  misc_feature (61)..(62): /note="This region represents a CpG dinucleotide"
  misc_feature (61)..(61): /note="Nucleotide may be methylated to form 5-methylcytosine"
gtaggggtagattgtgtacagggatttccatcccaagccctcagtccatctgttggggagcgcaggaggcgtgaaggcaaaatcaaacccgtgggctcagcggccaggaatggtcatgagac

SEQ ID NO: 813 - DNA, 122 bp, Homo sapiens
  misc_feature (61)..(62): /note="This region represents a CpG dinucleotide"
  misc_feature (61)..(61): /note="Nucleotide may be methylated to form 5-methylcytosine"
cccttaagcgcgagatgtaacgtcagcgcgcgcctgcgcccgtctcctagaagcggccgacggtagggtgggtgctcaccctggtttcctggttacagcgtctctattccggacgccagttc

SEQ ID NO: 814 - DNA, 122 bp, Homo sapiens
  misc_feature (61)..(62): /note="This region represents a CpG dinucleotide"
  misc_feature (61)..(61): /note="Nucleotide may be methylated to form 5-methylcytosine"
ggacctgagctctttttgtaacgagttgttttttcatgaggcctagtcacaagggcccttcgcgaccaggctcaaggaacgcaaaaaggtcaacttgttcttgcaattgtctgttgtttttc

SEQ ID NO: 815 - DNA, 122 bp, Homo sapiens
  misc_feature (61)..(62): /note="This region represents a CpG dinucleotide"
  misc_feature (61)..(61): /note="Nucleotide may be methylated to form 5-methylcytosine"
aattgaccacagacatatgtaaactctgtatgggacaataattattggaagccaagttctcgattactgtgctaagtgaggtgggatacttttaaagaatatatgtttggatctagtaaagg

SEQ ID NO: 816 - DNA, 122 bp, Homo sapiens
  misc_feature (61)..(62): /note="This region represents a CpG dinucleotide"
  misc_feature (61)..(61): /note="Nucleotide may be methylated to form 5-methylcytosine"
tccaagagctacataaaaatattccagaagaaccaaattatgtagcaatgaatgaacatgcgtgacagaatttgtgcattcaacatagctggcagaaaaactagttaaaatgctaggtagaa

SEQ ID NO: 817 - DNA, 122 bp, Homo sapiens
  misc_feature (61)..(62): /note="This region represents a CpG dinucleotide"
  misc_feature (61)..(61): /note="Nucleotide may be methylated to form 5-methylcytosine"
gcaaatctctgtaccttcctctcaatttttctgtgaacctaaaatgctctaaaaacttagcgttgtttttttagaaaaactattttgctgactaaaattaaagtatactggctttctttgat

SEQ ID NO: 818 - DNA, 122 bp, Homo sapiens
  misc_feature (61)..(62): /note="This region represents a CpG dinucleotide"
  misc_feature (61)..(61): /note="Nucleotide may be methylated to form 5-methylcytosine"
aaaagtttgcgaaactttctgaagagagaagccctgtggagagagggctgaagctgttcacggatgtttcagcctgagctgatctcccagctgaatgcagcctcatgagtgacctcagacaa

SEQ ID NO: 819 - DNA, 122 bp, Homo sapiens
  misc_feature (61)..(62): /note="This region represents a CpG dinucleotide"
  misc_feature (61)..(61): /note="Nucleotide may be methylated to form 5-methylcytosine"
gctgcaaagaccttggagctgtgggcccaaaactgcttcttctcactatcctgagggatacgcccctttcagagagggcaactgactgtgtggtgtttatggaaggagttggggggagggca

SEQ ID NO: 820 - DNA, 122 bp, Homo sapiens
  misc_feature (61)..(62): /note="This region represents a CpG dinucleotide"
  misc_feature (61)..(61): /note="Nucleotide may be methylated to form 5-methylcytosine"
ccccacacccagcttggccccgagccacgcctcccaccccgcccccacactcccgagccccgcctcgtctccacactccggcggcgcctccctacccggccccgcctccgcgctcgggctgc

SEQ ID NO: 821 - DNA, 122 bp, Homo sapiens
  misc_feature (61)..(62): /note="This region represents a CpG dinucleotide"
  misc_feature (61)..(61): /note="Nucleotide may be methylated to form 5-methylcytosine"
gcagtccgacgagggcgacacgagggcagacggtgtagccgaatcgtagccagagctgggcggcggcgagcgcccgtgcaccttcatgtgcttacgcagcgagctggggtgcgtgtagcact

SEQ ID NO: 822 - DNA, 122 bp, Homo sapiens
  misc_feature (61)..(62): /note="This region represents a CpG dinucleotide"
  misc_feature (61)..(61): /note="Nucleotide may be methylated to form 5-methylcytosine"
caccggccctgttccaccagcctccaggaggagcttctgcatccatctaggcccagagggcgaccctggggccctggctgacacacatgcaaggagcaaagtccagcctgtccctttagctc

SEQ ID NO: 823 - DNA, 122 bp, Homo sapiens
  misc_feature (61)..(62): /note="This region represents a CpG dinucleotide"
  misc_feature (61)..(61): /note="Nucleotide may be methylated to form 5-methylcytosine"
ggttcacagtaaaattgagcagaaggtacagagatttcccatacacgtctttcccccacacgtatggtctcccccatcatcaacatcctccaccagagtggtacatttattacaactaatga

SEQ ID NO: 824 - DNA, 122 bp, Homo sapiens
  misc_feature (61)..(62): /note="This region represents a CpG dinucleotide"
  misc_feature (61)..(61): /note="Nucleotide may be methylated to form 5-methylcytosine"
gccgcccatggcacgtgaagagaaaggagggagagttgggagccacgagagaagccggctcggagccgcttccgtcggggcccatgtttcgccccaacagacccgtctctcctttctctccc

SEQ ID NO: 825 - DNA, 122 bp, Homo sapiens
  misc_feature (61)..(62): /note="This region represents a CpG dinucleotide"
  misc_feature (61)..(61): /note="Nucleotide may be methylated to form 5-methylcytosine"
gtacaaactcttgggctcaagtgatactcccacctaggcctcccaaagtgctgggattaccggcctgagccactgcccctggccttgacgcctgcctatatttctgacctcatcgtttacta

SEQ ID NO: 826 - DNA, 122 bp, Homo sapiens
  misc_feature (61)..(62): /note="This region represents a CpG dinucleotide"
  misc_feature (61)..(61): /note="Nucleotide may be methylated to form 5-methylcytosine"
ccagcagtaggtgagcgagctgtcccagaccacatggcccaacatcctgtgcaccgtgcgcggctgccgcaagatcctgcccaacagccccgcgctcaacatgcacctggtcaagagccacc

SEQ ID NO: 827 - DNA, 122 bp, Homo sapiens
  misc_feature (61)..(62): /note="This region represents a CpG dinucleotide"
  misc_feature (61)..(61): /note="Nucleotide may be methylated to form 5-methylcytosine"
cctacatctgtcaaccaaatgaaacaaagtataaaataagaatcctcctacatcttttctcgttaatggaagacagtagcttcaaggaaaaagtaaagattcagcaaagggtttaaatacag

SEQ ID NO: 828 - DNA, 122 bp, Homo sapiens
  misc_feature (61)..(62): /note="This region represents a CpG dinucleotide"
  misc_feature (61)..(61): /note="Nucleotide may be methylated to form 5-methylcytosine"
agaatggcagtttcacctggcctttacagggacacttacttctttcagaagtcattaagtcggcttttattattcctaaacaaaagagctttattttctcatgagtaggttttagagtttta

SEQ ID NO: 829 - DNA, 122 bp, Homo sapiens
  misc_feature (61)..(62): /note="This region represents a CpG dinucleotide"
  misc_feature (61)..(61): /note="Nucleotide may be methylated to form 5-methylcytosine"
aaaatgatgcatccgtgcaacctaatattgttcagccttcaaaggaagaaaattatgacacgttacaacatgatgacccctgaggacattatgctaagtgaaataggacggacacaaaggga

SEQ ID NO: 830 - DNA, 122 bp, Homo sapiens
  misc_feature (61)..(62): /note="This region represents a CpG dinucleotide"
  misc_feature (61)..(61): /note="Nucleotide may be methylated to form 5-methylcytosine"
tttactaattctgctactgctatcttctaagaacttaaaaggaggagccaggtgtacaggcggaatgtgaaagtgaacaaggagcatgaccactgaagcacagcatcacagggagacgttta

SEQ ID NO: 831 - DNA, 122 bp, Homo sapiens
  misc_feature (61)..(62): /note="This region represents a CpG dinucleotide"
  misc_feature (61)..(61): /note="Nucleotide may be methylated to form 5-methylcytosine"
acggcggggacgcgcagctctgggaggcgcatttccgcggcatcgggcgcgcctaccgcgcgctgggcaagcaggacgacttcgccatccgcgtgctcaccgagaacttcacgctgcccttc

SEQ ID NO: 832 - DNA, 122 bp, Homo sapiens
  misc_feature (61)..(62): /note="This region represents a CpG dinucleotide"
  misc_feature (61)..(61): /note="Nucleotide may be methylated to form 5-methylcytosine"
actgactttggtagtaagacttctaatgtttacaaagcattttcacatatgctacacagccgtatgaattagactttgttgagttttgattattctcattttgcagatgaattaaggtccat

SEQ ID NO: 833 - DNA, 122 bp, Homo sapiens
  misc_feature (61)..(62): /note="This region represents a CpG dinucleotide"
  misc_feature (61)..(61): /note="Nucleotide may be methylated to form 5-methylcytosine"
ggaattattatgagccttctcttcttctaagcttattactactcaggtggactttttctacgtgaatgcttaatgatgtatttttgaaaaacaatagtagatctcagtttgtaactcaagga

SEQ ID NO: 834 - DNA, 122 bp, Homo sapiens
  misc_feature (61)..(62): /note="This region represents a CpG dinucleotide"
  misc_feature (61)..(61): /note="Nucleotide may be methylated to form 5-methylcytosine"
ctccctctttgccctccatcatgattggaagcatcctgaggccccgccagaagcagaagccgctatgctttctgtacagcttgcagaaccgtgagccaaataaatctcttttctttataaat

SEQ ID NO: 835 - DNA, 122 bp, Homo sapiens
  misc_feature (61)..(62): /note="This region represents a CpG dinucleotide"
  misc_feature (61)..(61): /note="Nucleotide may be methylated to form 5-methylcytosine"
cgttgctatagtgccgaggcctgccctgcccggaccttattctcaaagccccgccgatcccgccgtccccgcgaccccaagcgtcagcaaagtttatgcagttgaactggattctgagtata

SEQ ID NO: 836 - DNA, 122 bp, Homo sapiens
  misc_feature (61)..(62): /note="This region represents a CpG dinucleotide"
  misc_feature (61)..(61): /note="Nucleotide may be methylated to form 5-methylcytosine"
caaggcttatttttaagcttttaaaaggctggtttagcggctgcctggagcggagcgctgcgagagctgcgcggcgcgcccaggttccagccggctccgctccgggtcccccagtgctcgct

SEQ ID NO: 837 - DNA, 122 bp, Homo sapiens
  misc_feature (61)..(62): /note="This region represents a CpG dinucleotide"
  misc_feature (61)..(61): /note="Nucleotide may be methylated to form 5-methylcytosine"
ccgcgcccaaggcagacccagcaccttcatgccttccactgccgcttgcctcgcctgcctcgctcgcctcgcctcgtggctggcactccgccctctgtctgctgctccccaccttcttccct

SEQ ID NO: 838 - DNA, 122 bp, Homo sapiens
  misc_feature (61)..(62): /note="This region represents a CpG dinucleotide"
  misc_feature (61)..(61): /note="Nucleotide may be methylated to form 5-methylcytosine"
aaaggaactaatgagaccagtgcaggatcactggacacaggctctgaactggcactagggcgagactaggatctaccagacagaataggcattttggtggtcaggtgaatgttggtgcaagt

SEQ ID NO: 839 - DNA, 122 bp, Homo sapiens
  misc_feature (61)..(62): /note="This region represents a CpG dinucleotide"
  misc_feature (61)..(61): /note="Nucleotide may be methylated to form 5-methylcytosine"
taagcccaccgagggaggttagaggaaggcgctgtggctgtgggattaggaggccacagacgggaaccgcgccgagctagactagctgtagaaggctgtctctccaccccgccacagcgctc

SEQ ID NO: 840 - DNA, 122 bp, Homo sapiens
  misc_feature (61)..(62): /note="This region represents a CpG dinucleotide"
  misc_feature (61)..(61): /note="Nucleotide may be methylated to form 5-methylcytosine"
actgtaattactaatgcaaaggagcttctactcagcatgggaaattataagcagaaaactcgagtagagcaaatataaaggtagaaataacttctgaaaatagtcaaattccaagtattcta

SEQ ID NO: 841 - DNA, 122 bp, Homo sapiens
  misc_feature (61)..(62): /note="This region represents a CpG dinucleotide"
  misc_feature (61)..(61): /note="Nucleotide may be methylated to form 5-methylcytosine"
gcgacgccagttgtacttgtcattgcaattgcaaaatttaattaaatgttatgaaaactacgcgtctgaaaaggaagagctgctgttctgttaaaactaggctgaaacactttggaaccatt

SEQ ID NO: 842 - DNA, 122 bp, Homo sapiens
  misc_feature (61)..(62): /note="This region represents a CpG dinucleotide"
  misc_feature (61)..(61): /note="Nucleotide may be methylated to form 5-methylcytosine"
tccccagctatgtagaaatttgagtccattaaacctctttgttttgtaattgcccagtctcgggtatgtgtttatcagcagtgagaaaatggactaatacaggctgcatgcacttgtccctc

SEQ ID NO: 843 - DNA, 122 bp, Homo sapiens
  misc_feature (61)..(62): /note="This region represents a CpG dinucleotide"
  misc_feature (61)..(61): /note="Nucleotide may be methylated to form 5-methylcytosine"
ctgcgggacgcacggagaccgcggtcagcgcgccgcctggccggcccagcgcgcccagcccgcgcccagccccgtccactcccgtccagccccgccgcccggccgcagtccccagggcgcaa

SEQ ID NO: 844 - DNA, 122 bp, Homo sapiens
  misc_feature (61)..(62): /note="This region represents a CpG dinucleotide"
  misc_feature (61)..(61): /note="Nucleotide may be methylated to form 5-methylcytosine"
ctgggcatgggctcagcaatctgtttttaacaagtcctccaagtgattctgatgctcactcgtttcagaacccctggtctatagaatgggggctataagcgtcatgtgtatatatcagttgt

SEQ ID NO: 845 - DNA, 122 bp, Homo sapiens
  misc_feature (61)..(62): /note="This region represents a CpG dinucleotide"
  misc_feature (61)..(61): /note="Nucleotide may be methylated to form 5-methylcytosine"
tcatgttattcattgttttctggttattttgtataatctctgttcctttttttcccttatcgtttgtcactgtggtttggaaattacctgtagtggtatcagttgagcactttttctttctc

SEQ ID NO: 846 - DNA, 122 bp, Homo sapiens
  misc_feature (61)..(62): /note="This region represents a CpG dinucleotide"
  misc_feature (61)..(61): /note="Nucleotide may be methylated to form 5-methylcytosine"
cctctcccaggagagttcgagcctgtggcggcctgagaaagtggtggcatgtgggttctgcggctgcggccgagggctccccctgcttcccgaatctatttttggcagacagaggctcagga

SEQ ID NO: 847 - DNA, 122 bp, Homo sapiens
  misc_feature (61)..(62): /note="This region represents a CpG dinucleotide"
  misc_feature (61)..(61): /note="Nucleotide may be methylated to form 5-methylcytosine"
gccggaagatggcgcagacgcacaaagcacaccgatgctgcgccatgatagggccggcgccgcagtgtcttccgggaaacatagtctttaggcgtaaaggcagcagcccggccttgaagccg

SEQ ID NO: 848 - DNA, 122 bp, Homo sapiens
  misc_feature (61)..(62): /note="This region represents a CpG dinucleotide"
  misc_feature (61)..(61): /note="Nucleotide may be methylated to form 5-methylcytosine"
ggaaaggcgagtcggagtgggtgatgagaggccgggagagcccgtccgagccggagagaccggagagaagggagcgagcgactgtgcggcgctcacgctgccagagcccgggcggagtgcag

SEQ ID NO: 849 - DNA, 122 bp, Homo sapiens
  misc_feature (61)..(62): /note="This region represents a CpG dinucleotide"
  misc_feature (61)..(61): /note="Nucleotide may be methylated to form 5-methylcytosine"
tcctcgccgtcggggtcctcctcctctgccgacgagttgtcactgggcgaggcgtagctgcgctctacgccgcggaggggcggcctcttggaggcggggaccgggtactcccgctgcagccc

SEQ ID NO: 850 - DNA, 122 bp, Homo sapiens
  misc_feature (61)..(62): /note="This region represents a CpG dinucleotide"
  misc_feature (61)..(61): /note="Nucleotide may be methylated to form 5-methylcytosine"
gctgcgctggggggcggaggacagcgcaggagctgcagccgccgccttcgctggagcagccgaggggccggtgccacctttgctcgccccctcactaccatgtacagtgtgcgctgcaagaa

SEQ ID NO: 851 - DNA, 122 bp, Homo sapiens
  misc_feature (61)..(62): /note="This region represents a CpG dinucleotide"
  misc_feature (61)..(61): /note="Nucleotide may be methylated to form 5-methylcytosine"
atgtggcaaaagtccctgtgtgcagctgatgtgtagctccaagagtaaggcctgaactggcgttctggaggcggggagcttgtgaggctcacggggcagatcctcaggctcttagactcttg

SEQ ID NO: 852 - DNA, 122 bp, Homo sapiens
  misc_feature (61)..(62): /note="This region represents a CpG dinucleotide"
  misc_feature (61)..(61): /note="Nucleotide may be methylated to form 5-methylcytosine"
cataatggcattcagtcaatggcagagcacatataggacagtgatcccataacataataacggagctgaaaattttctattgcctggtgatggaatgtcatagcacaatgtatttcctcttc

SEQ ID NO: 853 - DNA, 122 bp, Homo sapiens
  misc_feature (61)..(62): /note="This region represents a CpG dinucleotide"
  misc_feature (61)..(61): /note="Nucleotide may be methylated to form 5-methylcytosine"
agggaccgagcgggtgcgggcggggcgggcggggcgggcggggcgggggtgtcgggggctcggactcggagccgtccctgccagtggctttcgtgggcggccccgccttggagcccaggcca

SEQ ID NO: 854 - DNA, 122 bp, Homo sapiens
  misc_feature (61)..(62): /note="This region represents a CpG dinucleotide"
  misc_feature (61)..(61): /note="Nucleotide may be methylated to form 5-methylcytosine"
acagattgtatttgttaatagtcttcagttagctttgagattcattatctcattggtccccgaaggaagagtatggtatgaggttctgcatttgacaggtgaggaaactgaagtccagagac

SEQ ID NO: 855 - DNA, 122 bp, Homo sapiens
  misc_feature (61)..(62): /note="This region represents a CpG dinucleotide"
  misc_feature (61)..(61): /note="Nucleotide may be methylated to form 5-methylcytosine"
ttttttttttttttttgacaaggctgctaagagaacactgcaatctttgggtagttcacccgttttctttactgtgcaaggttcataaaggcaggcactatgtctgtcatgtttgtcactat

SEQ ID NO: 856 - DNA, 122 bp, Homo sapiens
  misc_feature (61)..(62): /note="This region represents a CpG dinucleotide"
  misc_feature (61)..(61): /note="Nucleotide may be methylated to form 5-methylcytosine"
tttatttctcaatccccaaatttagctgaaattgaattcatgggggccaaatattccatgcggtgtttctgctgaattctgttcattatacttgttttcttgagttttatatttttggattg

SEQ ID NO: 857 - DNA, 122 bp, Homo sapiens
  misc_feature (61)..(62): /note="This region represents a CpG dinucleotide"
  misc_feature (61)..(61): /note="Nucleotide may be methylated to form 5-methylcytosine"
cattcatgtgttcagtgaagtagcacttttaattctctttaagaacttttcctttgcatccgcaacttggctgtttagtggaaaggacctagcttttgacctaccttggctttcaacatacc

SEQ ID NO: 858 - DNA, 122 bp, Homo sapiens
  misc_feature (61)..(62): /note="This region represents a CpG dinucleotide"
  misc_feature (61)..(61): /note="Nucleotide may be methylated to form 5-methylcytosine"
ggaggaggaggagaagaaactatttcgcgataccccattctgcgggtgctttgccgctgccgcttctgctgccgccgatccgagtccgcgggttcgaacaccgcagcggtggggacggtggg

SEQ ID NO: 859 - DNA, 122 bp, Homo sapiens
  misc_feature (61)..(62): /note="This region represents a CpG dinucleotide"
  misc_feature (61)..(61): /note="Nucleotide may be methylated to form 5-methylcytosine"
caatgaaagcactttctagcagctgaaaacacatgactacagggatggatttttttaaaacgcaaggtgagacatccttaaattatgaaccaaaaagctcacccagagttgtcaaagagaga

SEQ ID NO: 860 - DNA, 122 bp, Homo sapiens
  misc_feature (61)..(62): /note="This region represents a CpG dinucleotide"
  misc_feature (61)..(61): /note="Nucleotide may be methylated to form 5-methylcytosine"
gtttatttacaggaaaagcctgcgaagagttccagttaggaatctggctgagatcctgatcgcttacaagctgaggcttttataataaagtttctgttggggaggggttggggaagtgctgg

SEQ ID NO: 861 - DNA, 122 bp, Homo sapiens
  misc_feature (61)..(62): /note="This region represents a CpG dinucleotide"
  misc_feature (61)..(61): /note="Nucleotide may be methylated to form 5-methylcytosine"
cctgccttgggccacggaaccccaagcttgccagcctttggactcctggacttataccagcggcccctgggttcttaggccttcagcactggactgagagctacatgactggcttctctagt

SEQ ID NO: 862 - DNA, 122 bp, Homo sapiens
  misc_feature (61)..(62): /note="This region represents a CpG dinucleotide"
  misc_feature (61)..(61): /note="Nucleotide may be methylated to form 5-methylcytosine"
tcccctcttcctcttggagcctgcaatcagtaaattcgccaaaagaaagaacgaaagatccgcctaaacctgccggcgtgcccccacccccggtctacagaggcggaggtggctgcggcggt

SEQ ID NO: 863 - DNA, 122 bp, Homo sapiens
  misc_feature (61)..(62): /note="This region represents a CpG dinucleotide"
  misc_feature (61)..(61): /note="Nucleotide may be methylated to form 5-methylcytosine"
cttgcgagtggagatttagagcccgggaatgaggcgccgtgtccttaggaatctcgcgcccggggagcgctgagggaccggggagccgggtggggagcgggcctcggggcgcccggcggcgg

SEQ ID NO: 864 - DNA, 122 bp, Homo sapiens
  misc_feature (61)..(62): /note="This region represents a CpG dinucleotide"
  misc_feature (61)..(61): /note="Nucleotide may be methylated to form 5-methylcytosine"
ttgtcacatcagtggaatcttgctttcacaaaagatttctctgtagcatgcaaagctgttcgctagtattttacccaagtagaacttctttcaaaattagagtcaagcctctcaaaccctgc

SEQ ID NO: 865 - DNA, 122 bp, Homo sapiens
  misc_feature (61)..(62): /note="This region represents a CpG dinucleotide"
  misc_feature (61)..(61): /note="Nucleotide may be methylated to form 5-methylcytosine"
gaaatgaatgtaaacgttgactttcacttatagaatggaacacacttcaagttctataaacgttaaatgaaacctacagcaggccatggatttggactgagctcctgcattatacccaacag

SEQ ID NO: 866 - DNA, 122 bp, Homo sapiens
  misc_feature (61)..(62): /note="This region represents a CpG dinucleotide"
  misc_feature (61)..(61): /note="Nucleotide may be methylated to form 5-methylcytosine"
ctaccaagcttgcaagaccagttgaagctgactcaaaaatcctaacattcagctgattgccggcaggcttagagtcaggcatctgctgcttcggtgggggcccaacgcgcatgctgggcgcc

SEQ ID NO: 867 - DNA, 122 bp, Homo sapiens
  misc_feature (61)..(62): /note="This region represents a CpG dinucleotide"
  misc_feature (61)..(61): /note="Nucleotide may be methylated to form 5-methylcytosine"
agccttccaggatcgcacccggcacgcgctccacgcctcgttgtctgttcttcggagcaccgaccatgatcacaaatcagctcgctcgctgtgtttcctgccgggtcgctaccgccatgatc

SEQ ID NO: 868 - DNA, 122 bp, Homo sapiens
  misc_feature (61)..(62): /note="This region represents a CpG dinucleotide"
  misc_feature (61)..(61): /note="Nucleotide may be methylated to form 5-methylcytosine"
caaatctaaaccattagagtctctgtggcgccatcggttagtgccttcggctgtttgaaccgaaaggctggtggttcaagcccacccagagatggtaccttttacttaggcaagattcacgc

SEQ ID NO: 869 - DNA, 122 bp, Homo sapiens
  misc_feature (61)..(62): /note="This region represents a CpG dinucleotide"
  misc_feature (61)..(61): /note="Nucleotide may be methylated to form 5-methylcytosine"
tggcacgggagtggtaaaggaatgctgacgacaagcacatgcaacctcagcatcagcctgcgtgtcccgacattgacccatctgcacatttcagtcccagcctagattctgcatttgtagaa

SEQ ID NO: 870 - DNA, 122 bp, Homo sapiens
  misc_feature (61)..(62): /note="This region represents a CpG dinucleotide"
  misc_feature (61)..(61): /note="Nucleotide may be methylated to form 5-methylcytosine"
gactcccccaccgcccccgcacccacgacccgcgtggtcccagcccctccaccctcttcacgcaccctcgcacccttttgtgcgaccccgtgccctctccgggctgccaacccctgccaccc

SEQ ID NO: 871 - DNA, 122 bp, Homo sapiens
  misc_feature (61)..(62): /note="This region represents a CpG dinucleotide"
  misc_feature (61)..(61): /note="Nucleotide may be methylated to form 5-methylcytosine"
cacatgggcacgcagtccatgtgtgttgaacgagcttcctgctgtggagcaggatgagcgcgggatgtggagtccagacgcggtctgctgctcacctgcgacctcagtttccctgtgccatc

SEQ ID NO: 872 - DNA, 122 bp, Homo sapiens
  misc_feature (61)..(62): /note="This region represents a CpG dinucleotide"
  misc_feature (61)..(61): /note="Nucleotide may be methylated to form 5-methylcytosine"
attgagaaaaatcttgggacatcctcgagttttccacatcttcttaggagatcaatcaaacgagataatgtcatataattatctagaaacaaataatacttcagatatgggcaccattttat

SEQ ID NO: 873 - DNA, 122 bp, Homo sapiens
  misc_feature (61)..(62): /note="This region represents a CpG dinucleotide"
  misc_feature (61)..(61): /note="Nucleotide may be methylated to form 5-methylcytosine"
gtttattaatatctcaatcagcatctctgggggtggaactaggtatttgtaacgtctccccgtgggtttctaatgcacagctaagtgcccaggataagtgccctagggcaatctaagtaaaa

SEQ ID NO: 874 - DNA, 122 bp, Homo sapiens
  misc_feature (61)..(62): /note="This region represents a CpG dinucleotide"
  misc_feature (61)..(61): /note="Nucleotide may be methylated to form 5-methylcytosine"
atggatagtgtatttgaaaagtcacatcgatttttctcctggaatgtcctctagatgtgccgtagcttcaagttttacatgtaggtctaatttaggttgtgtgatacaatgggtttgcattt

SEQ ID NO: 875 - DNA, 122 bp, Homo sapiens
  misc_feature (61)..(62): /note="This region represents a CpG dinucleotide"
  misc_feature (61)..(61): /note="Nucleotide may be methylated to form 5-methylcytosine"
gtgccgcccgctgcgctatgcggggctcgtctccccgcgcctatgtcgcacgctggccagcgcctcctggctaagcggcctcaccaactcggttgcgcaaaccgcgctcctggctgagcggc

SEQ ID NO: 876 - DNA, 122 bp, Homo sapiens
  misc_feature (61)..(62): /note="This region represents a CpG dinucleotide"
  misc_feature (61)..(61): /note="Nucleotide may be methylated to form 5-methylcytosine"
cataacctcccacaagtattcacaggaaatggtgccactcatgcacagaacttcctgagccggcatccaccacatcaaacccactgagtgagctcccttgttgttgtggtatgttgtcatat

SEQ ID NO: 877 - DNA, 122 bp, Homo sapiens
  misc_feature (61)..(62): /note="This region represents a CpG dinucleotide"
  misc_feature (61)..(61): /note="Nucleotide may be methylated to form 5-methylcytosine"
agggtgtgggcggccggcagggaccgcgggtgagcggtgggcaggtctcaggactctctccggacgtgcggtccggggccgcgccgggtgctgggcgcgctacccagccaaggtgaggcagg

SEQ ID NO: 878 - DNA, 122 bp, Homo sapiens
  misc_feature (61)..(62): /note="This region represents a CpG dinucleotide"
  misc_feature (61)..(61): /note="Nucleotide may be methylated to form 5-methylcytosine"
ccagggttgctgcttatcattctacaatccacagggcagctttccaaagaatttgctggccgcaaataccaacaggtctgagattaagaaaccctgttctagatgaatatacaccaaacttt

SEQ ID NO: 879 - DNA, 122 bp, Homo sapiens
  misc_feature (61)..(62): /note="This region represents a CpG dinucleotide"
  misc_feature (61)..(61): /note="Nucleotide may be methylated to form 5-methylcytosine"
ccagcgcgtcccccccgcacccccggcccctcctccgcgccaactgtgtaaatcagccgccgcagtcctctcgccgcgcatcgcaggcaaaatcccggcttaggaagcaaggaagcaagtga

SEQ ID NO: 880 - DNA, 122 bp, Homo sapiens
  misc_feature (61)..(62): /note="This region represents a CpG dinucleotide"
  misc_feature (61)..(61): /note="Nucleotide may be methylated to form 5-methylcytosine"
cgctcgccgggccccgcgcactagctctggggttcgcagaggcgccgcgcccggcttccgcggcagctccaacacagcgcgcaggcggtcgatcccggtcagcttaaaccgggcgcaagccc

SEQ ID NO: 881 - DNA, 122 bp, Homo sapiens
  misc_feature (61)..(62): /note="This region represents a CpG dinucleotide"
  misc_feature (61)..(61): /note="Nucleotide may be methylated to form 5-methylcytosine"
tatcagtgggctatgttcaggtccagagacaaaagagctgtcaacttaaactaacctgtgcggtgcctcagctcctggacttactggttgatgcaaccttagggaaagcctgtgtgcatcaa

SEQ ID NO: 882 - DNA, 122 bp, Homo sapiens
  misc_feature (61)..(62): /note="This region represents a CpG dinucleotide"
  misc_feature (61)..(61): /note="Nucleotide may be methylated to form 5-methylcytosine"
ctgccgcgccgcctcagccggtcggagctagacagaaaacgagcgcaggctcccctcccccgccttctcgcgtcctccccgccgtcgcgccctattggctgccagggcttcagcgatggtgc

SEQ ID NO: 883 - DNA, 122 bp, Homo sapiens
  misc_feature (61)..(62): /note="This region represents a CpG dinucleotide"
  misc_feature (61)..(61): /note="Nucleotide may be methylated to form 5-methylcytosine"
gagatggagctggccaggtggatacctggagcaagagcactccaggcagaaggcacagcccgtgcaaaggccctggggcaggactgcgcctggggtgttggaggaacagcgaagaggcctgt

SEQ ID NO: 884 - DNA, 122 bp, Homo sapiens
  misc_feature (61)..(62): /note="This region represents a CpG dinucleotide"
  misc_feature (61)..(61): /note="Nucleotide may be methylated to form 5-methylcytosine"
ccgggccaaggtcgcggcagtagtcggcaagcgtttgattctctggcattggatcgcgagcggtgtctgcttgttccgcagagggctcccaggacagatttgtccattagtttaacttcatt

SEQ ID NO: 885 - DNA, 122 bp, Homo sapiens
  misc_feature (61)..(62): /note="This region represents a CpG dinucleotide"
  misc_feature (61)..(61): /note="Nucleotide may be methylated to form 5-methylcytosine"
aaacccgccgcggaggaagaggaggaggaatccatcccagggcgaccaagcttgcagagacgaactccgcaccgaccttcacgtgtctccgcgacggaaccggaaccacagctagctgcctc

SEQ ID NO: 886 - DNA, 122 bp, Homo sapiens
  misc_feature (61)..(62): /note="This region represents a CpG dinucleotide"
  misc_feature (61)..(61): /note="Nucleotide may be methylated to form 5-methylcytosine"
agttttctatttttcttttcattgtatctttttttttacaaggagacaaaatttaaacaacgctgggattttaaaattcaggcattttaaatgatatagtgttaactctctgtaacttaact

SEQ ID NO: 887 - DNA, 122 bp, Homo sapiens
  misc_feature (61)..(62): /note="This region represents a CpG dinucleotide"
  misc_feature (61)..(61): /note="Nucleotide may be methylated to form 5-methylcytosine"
gttttacaaaatgtgatgttttactacctctacttttaacatatatcaggcacttcggaacgtctagaaagactagttatttcaaaaaagtactttgcactgtcaactatatataaagtagt

SEQ ID NO: 888 - DNA, 122 bp, Homo sapiens
  misc_feature (61)..(62): /note="This region represents a CpG dinucleotide"
  misc_feature (61)..(61): /note="Nucleotide may be methylated to form 5-methylcytosine"
gtcggacgtggggttggagtcgcacaccaccaggcacttgccctccagcacgatgggctccgtctcattctgcccgcgggccgggcccgccagccacgcagcccccagcagcagcagctcca

SEQ ID NO: 889 - DNA, 122 bp, Homo sapiens
  misc_feature (61)..(62): /note="This region represents a CpG dinucleotide"
  misc_feature (61)..(61): /note="Nucleotide may be methylated to form 5-methylcytosine"
cttcccggctccccgcggtgcgcacccgctggccactctgcgcacgcgcgccgggtgccccggcctaaggccgttgacctcgggttctccccggcacagtcgaatccacgccagggccctca

SEQ ID NO: 890 - DNA, 122 bp, Homo sapiens
  misc_feature (61)..(62): /note="This region represents a CpG dinucleotide"
  misc_feature (61)..(61): /note="Nucleotide may be methylated to form 5-methylcytosine"
gtcgaccaatggcagggcgctgttgagtgcagcggggcggggccgggcgcgggggtggggcgagcggcgggcggggcggggcggccggccggggggtgggaggagaggggcggggcgggccg

SEQ ID NO: 891 - DNA, 122 bp, Homo sapiens
  misc_feature (61)..(62): /note="This region represents a CpG dinucleotide"
  misc_feature (61)..(61): /note="Nucleotide may be methylated to form 5-methylcytosine"
attctgtgaagtcatgcacaatatttcgacacaattttccccagcaggaatttattgattcgagcttggtggctttaatggatatttttataacaatgatggcattttcaatggtgtaattt

SEQ ID NO: 892 - DNA, 122 bp, Homo sapiens
  misc_feature (61)..(62): /note="This region represents a CpG dinucleotide"
  misc_feature (61)..(61): /note="Nucleotide may be methylated to form 5-methylcytosine"
accctgctcactaggtggtgctgtaggattaagtctcatagtgggtggctgagggtatggcgccctgtcctgtggggctgggaacattcctggctgtccatactgattttccgggggtggcc

SEQ ID NO: 893 - DNA, 122 bp, Homo sapiens
  misc_feature (61)..(62): /note="This region represents a CpG dinucleotide"
  misc_feature (61)..(61): /note="Nucleotide may be methylated to form 5-methylcytosine"
agaaattataatagaaacctcaaaacctcttttgttagggcaaaaagcacacgaagccaacgaacagaaactaagggaacttccaatgcaacacaacctgaatttaattatgaggaaacatc

SEQ ID NO: 894 - DNA, 122 bp, Homo sapiens
  misc_feature (61)..(62): /note="This region represents a CpG dinucleotide"
  misc_feature (61)..(61): /note="Nucleotide may be methylated to form 5-methylcytosine"
aatgacatatgaagatggaggcggagacagtagtgaggcatctcaagccaaggcatgctacgggttgctgacaaccaccagaagctgggagagaggcacggaaaagattctccctcagagcc

SEQ ID NO: 895 - DNA, 122 bp, Homo sapiens
  misc_feature (61)..(62): /note="This region represents a CpG dinucleotide"
  misc_feature (61)..(61): /note="Nucleotide may be methylated to form 5-methylcytosine"
aaaaaaaaaaaaaaaaaaaaaaaaaaaaaaaaaaaaagccccacaaccacatgggggcagcgtgcttacaggaggacgctccgtaatgtcagcctctgcccagtgtcacctgcacagccgca

SEQ ID NO: 896 - DNA, 122 bp, Homo sapiens
  misc_feature (61)..(62): /note="This region represents a CpG dinucleotide"
  misc_feature (61)..(61): /note="Nucleotide may be methylated to form 5-methylcytosine"
ctttcctgggcctgcagtttgcagatggcagatcgtgggacttctcagcatccataatctcgtggccagtcccttgtaataataataaatttatatatctctatatatcctattggttggtt

SEQ ID NO: 897 - DNA, 122 bp, Homo sapiens
  misc_feature (61)..(62): /note="This region represents a CpG dinucleotide"
  misc_feature (61)..(61): /note="Nucleotide may be methylated to form 5-methylcytosine"
ggaactacggacagtgagccctggcgctcgctgccctgcgccttaatttgctggcggcggcgatcccggaggcccgcagccagtcagcgccgtctcacgtcaccgcttcctgattccgccgc

SEQ ID NO: 898 - DNA, 122 bp, Homo sapiens
  misc_feature (61)..(62): /note="This region represents a CpG dinucleotide"
  misc_feature (61)..(61): /note="Nucleotide may be methylated to form 5-methylcytosine"
cctgctcgcccgcggccggcagtgagggcggcagcggctcgtagcggtcgcagccgccgccgccacagccgccttgaggcggggcccctccaccatcggccacctccggctccagcaggtgg

SEQ ID NO: 899 - DNA, 122 bp, Homo sapiens
  misc_feature (61)..(62): /note="This region represents a CpG dinucleotide"
  misc_feature (61)..(61): /note="Nucleotide may be methylated to form 5-methylcytosine"
taggtagatgatagatgataaatagatagatgacagatagatagatagatgattgatagacgacagattgatagataaatgatagatgatatagatagatgatagatcaataaacagacaga

SEQ ID NO: 900 - DNA, 122 bp, Homo sapiens
  misc_feature (61)..(62): /note="This region represents a CpG dinucleotide"
  misc_feature (61)..(61): /note="Nucleotide may be methylated to form 5-methylcytosine"
ccgcaagatggcggctggactcgcagccaggaccacagcgtcccgccagtttctgcgcggcgccagtccggggctctctgggcagctctgcacccgcaatcccgagtatttcccgggttgtt

SEQ ID NO: 901 - DNA, 122 bp, Homo sapiens
  misc_feature (61)..(62): /note="This region represents a CpG dinucleotide"
  misc_feature (61)..(61): /note="Nucleotide may be methylated to form 5-methylcytosine"
atcaggggtttccacttttgtttctttctcatttttttcttgccaccatgtaagaagtgccgtttgcctcctaccatgattctgaggcctccccagccatgtggaactgtaagtgcaattaa

SEQ ID NO: 902 - DNA, 122 bp, Homo sapiens
  misc_feature (61)..(62): /note="This region represents a CpG dinucleotide"
  misc_feature (61)..(61): /note="Nucleotide may be methylated to form 5-methylcytosine"
cccgcccgccgctgccaccgccgccgccgccaagcgccaggctgctgtggctgctgccggcgcctagcgagcactgcccgtgcctccgccactccggctccggctccggctccgacgcggac

SEQ ID NO: 903 - DNA, 122 bp, Homo sapiens
  misc_feature (61)..(62): /note="This region represents a CpG dinucleotide"
  misc_feature (61)..(61): /note="Nucleotide may be methylated to form 5-methylcytosine"
ctcccggtatcaccttcgaacgcgctggccggccccctcctagcctggtgcagtcggctccgcttctactcagtctcgggtcctcctgggccaacgcagaccctggtgcctccttccttaga

SEQ ID NO: 904 - DNA, 122 bp, Homo sapiens
  misc_feature (61)..(62): /note="This region represents a CpG dinucleotide"
  misc_feature (61)..(61): /note="Nucleotide may be methylated to form 5-methylcytosine"
ctcagcagttatagattaaactggtctcaggttacaacaggcagtttcagcagctggactcgtagagaattacatttctagagcaatgttttgtgccctgcatgctttccccctggcttctc

SEQ ID NO: 905 - DNA, 122 bp, Homo sapiens
  misc_feature (61)..(62): /note="This region represents a CpG dinucleotide"
  misc_feature (61)..(61): /note="Nucleotide may be methylated to form 5-methylcytosine"
cggacgcaggcagggtcttggggcagcgcctggctcccgcgctgctcctcctccgcgcggcgagggatctctgtgcgtcctcactggcccatgcacccagcacctgcgactcccgccgtcgg

SEQ ID NO: 906 - DNA, 122 bp, Homo sapiens
  misc_feature (61)..(62): /note="This region represents a CpG dinucleotide"
  misc_feature (61)..(61): /note="Nucleotide may be methylated to form 5-methylcytosine"
caatcatggctcactgtaacctcaaactattgggttcaagggatcctcccacccagcctccggagtagctggaactgtaggcgagtaccactacacctggcaaatttttgtattttttgtag

SEQ ID NO: 907 - DNA, 122 bp, Homo sapiens
  misc_feature (61)..(62): /note="This region represents a CpG dinucleotide"
  misc_feature (61)..(61): /note="Nucleotide may be methylated to form 5-methylcytosine"
ttgttttccaaggtttctcggctcagaaccattcagcattcttttcacttgggaaatgtgcgtgctccttaggatattttccaggctgcagccacccctgtcctctagtcacggcagtattt

SEQ ID NO: 908 - DNA, 122 bp, Homo sapiens
  misc_feature (61)..(62): /note="This region represents a CpG dinucleotide"
  misc_feature (61)..(61): /note="Nucleotide may be methylated to form 5-methylcytosine"
agtaatctttttatttcttctatcaagtatattttgtttctgagaggattaaaaataacacggtgcattgaagtgatatttcttggtggtttttaatttaagaaaatctgataaagtagttt

SEQ ID NO: 909 - DNA, 122 bp, Homo sapiens
  misc_feature (61)..(62): /note="This region represents a CpG dinucleotide"
  misc_feature (61)..(61): /note="Nucleotide may be methylated to form 5-methylcytosine"
ctcctctctgtctcagccaggactggtttctgtaagaaacagcaggagctgtggcagcggcgaaaggaagcggctgaggcgcttggaacccgaaaagtctcggtgctcctggctacctcgca

SEQ ID NO: 910 - DNA, 122 bp, Homo sapiens
  misc_feature (61)..(62): /note="This region represents a CpG dinucleotide"
  misc_feature (61)..(61): /note="Nucleotide may be methylated to form 5-methylcytosine"
catacttgttaaatgaatcaataaaggcttattatgggccaccagaggccccagaccacacgctgacaataaatattttcaacaatgtaaagagtagaaccgtatcaattgtaatcttagag

SEQ ID NO: 911 - DNA, 122 bp, Homo sapiens
  misc_feature (61)..(62): /note="This region represents a CpG dinucleotide"
  misc_feature (61)..(61): /note="Nucleotide may be methylated to form 5-methylcytosine"
agactccctccacacccacagtgccccctgaggaagcctggccccacagatggtgactggcgggagccatcagaccccctgtctgattgattgcacttgagtgctagagaggaggccatgag

SEQ ID NO: 912 - DNA, 122 bp, Homo sapiens
  misc_feature (61)..(62): /note="This region represents a CpG dinucleotide"
  misc_feature (61)..(61): /note="Nucleotide may be methylated to form 5-methylcytosine"
acctcatgatccacccaccttcacctcctaaagtgctggaattacaggcgtgagccaccgcgcccgtccgtgttagtccattttgtgttgctataaagaaatacctgagactgggtaattga

SEQ ID NO: 913 - DNA, 122 bp, Homo sapiens
  misc_feature (61)..(62): /note="This region represents a CpG dinucleotide"
  misc_feature (61)..(61): /note="Nucleotide may be methylated to form 5-methylcytosine"
ggaattaaccaaagatgaactctgctcctttcttattcgttttgtttagattccactgtgcgtctagccttattcaaaaacaatgaaaataaagtgtctcttccaaaatcaccaaagatggt

SEQ ID NO: 914 - DNA, 122 bp, Homo sapiens
  misc_feature (61)..(62): /note="This region represents a CpG dinucleotide"
  misc_feature (61)..(61): /note="Nucleotide may be methylated to form 5-methylcytosine"
tgcaaaacgaccgactctattgaagacacactgggtggcgcgggaggttcctgccaatgccgggaggaagagcaacccaggacgcctgtgcctgggagggatggaaaggccaggggagggtg

SEQ ID NO: 915 - DNA, 122 bp, Homo sapiens
  misc_feature (61)..(62): /note="This region represents a CpG dinucleotide"
  misc_feature (61)..(61): /note="Nucleotide may be methylated to form 5-methylcytosine"
ttttagctataagtgagattccagaatagttttgtgtcttccaggcactcagctcctggccgaagtggatgctacaaatttagacatcaaatttacagggtagtcatttttctcctctttag

SEQ ID NO: 916 - DNA, 122 bp, Homo sapiens
  misc_feature (61)..(62): /note="This region represents a CpG dinucleotide"
  misc_feature (61)..(61): /note="Nucleotide may be methylated to form 5-methylcytosine"
tagtaggacctcatcttaattaattacatctgcaacaactcttatttccaaatcaggtcacgttctgacatagtggggattcaaacttcaacatatctttttttggagtcacagttcaatcc

SEQ ID NO: 917 - DNA, 122 bp, Homo sapiens
  misc_feature (61)..(62): /note="This region represents a CpG dinucleotide"
  misc_feature (61)..(61): /note="Nucleotide may be methylated to form 5-methylcytosine"
tttatgatctgtatcttgtgatgacctcctatctcaccctgtgacttagaatgtcttaaccgtctgggaatgcagcccagtaggtctcagcctcattttacctagctcctatttaagatgga

SEQ ID NO: 918 - DNA, 122 bp, Homo sapiens
  misc_feature (61)..(62): /note="This region represents a CpG dinucleotide"
  misc_feature (61)..(61): /note="Nucleotide may be methylated to form 5-methylcytosine"
gggcacgtggagcggcctctggctcacctgcgcctcccgggccccagcccagcgccgccgcgtcaccgcccctcccgcggccccgccccagcccggctcattggctgccgctcggaggggag

SEQ ID NO: 919 - DNA, 122 bp, Homo sapiens
  misc_feature (61)..(62): /note="This region represents a CpG dinucleotide"
  misc_feature (61)..(61): /note="Nucleotide may be methylated to form 5-methylcytosine"
cacaaagttacagggaagcaaatgcacatgcatgcacaaacacacatatacatatacacacgtgcacacatgcgtgcacacacatacacacaagtgcacaaacgcgcacacacacatacaca

SEQ ID NO: 920 - DNA, 122 bp, Homo sapiens
  misc_feature (61)..(62): /note="This region represents a CpG dinucleotide"
  misc_feature (61)..(61): /note="Nucleotide may be methylated to form 5-methylcytosine"
tactcccgcaagagtggccttaatcaaaaaatcaaaaactcaaaaaataatagatgttggcgtggatttggtgaagagggaacacctctacactgctgatggatagtacaaccactgtggaa

SEQ ID NO: 921 - DNA, 122 bp, Homo sapiens
  misc_feature (61)..(62): /note="This region represents a CpG dinucleotide"
  misc_feature (61)..(61): /note="Nucleotide may be methylated to form 5-methylcytosine"
cattagtcaaaataggtcatcttaggttcaatattagaaaagtaaagttggtttcattttcgggctcctgggcttggtgaatcccatcactgtggtgtgtgtcatcagttgcacacatggca

SEQ ID NO: 922 - DNA, 122 bp, Homo sapiens
  misc_feature (61)..(62): /note="This region represents a CpG dinucleotide"
  misc_feature (61)..(61): /note="Nucleotide may be methylated to form 5-methylcytosine"
gttaatagggtagaatagaaatatcagaatatgtcactcatgggaagggaactgctgtttcgtggaaatgttgtttcacagagcgcttgttttagtcaaaggtgaaagctactggcatggaa

SEQ ID NO: 923 - DNA, 122 bp, Homo sapiens
  misc_feature (61)..(62): /note="This region represents a CpG dinucleotide"
  misc_feature (61)..(61): /note="Nucleotide may be methylated to form 5-methylcytosine"
tgcccgttctcttcctctcattggatccaagcatttcacctggaagtgcgggagtccgggcggctgcggccctccatctttggtttgtcctcacagaagtcttttgtgaatcaacatttgtg

SEQ ID NO: 924 - DNA, 122 bp, Homo sapiens
  misc_feature (61)..(62): /note="This region represents a CpG dinucleotide"
  misc_feature (61)..(61): /note="Nucleotide may be methylated to form 5-methylcytosine"
agcggccaaaaagagttgattgctattgggatccgctgagtaaagacacgggcaggggtgcgcggaggtgagaaaactgaagacctggaagatttttttttccttcaaaaacccgtttccat

SEQ ID NO: 925 - DNA, 122 bp, Homo sapiens
  misc_feature (61)..(62): /note="This region represents a CpG dinucleotide"
  misc_feature (61)..(61): /note="Nucleotide may be methylated to form 5-methylcytosine"
ttacacagtctcatctttaagcaaacattaaacaccaaaaattaaaaatcccttatctgacggttgaccagtgcaaatgaaaatgactcaaaactacaagtcaggaatggacaaccaatgta

SEQ ID NO: 926 - DNA, 122 bp, Homo sapiens
  misc_feature (61)..(62): /note="This region represents a CpG dinucleotide"
  misc_feature (61)..(61): /note="Nucleotide may be methylated to form 5-methylcytosine"
ccatctgcgacccacctcaaatcatgcttccacccctcccccagaaaaacacaaccttcacggaagagttttgaaaagatttccggcaagaaaataatgttaccagagaccgttgaggtctt

SEQ ID NO: 927 - DNA, 122 bp, Homo sapiens
  misc_feature (61)..(62): /note="This region represents a CpG dinucleotide"
  misc_feature (61)..(61): /note="Nucleotide may be methylated to form 5-methylcytosine"
cttagatgcctgaatttggagaggaaaatatttgttaatgtaggagaaaatatcctaaagcgatgtaataaatactgtgattttgaaaattcaaggaaaaaaagagaatcctacaagcatgt

SEQ ID NO: 928 - DNA, 122 bp, Homo sapiens
  misc_feature (61)..(62): /note="This region represents a CpG dinucleotide"
  misc_feature (61)..(61): /note="Nucleotide may be methylated to form 5-methylcytosine"
gccaaggactgttgttatttgaaggcttgactggggctggaggatccccttccaagacagcgcacttatgggactgacaagttggtgccagctgttggcaggaggcctcagtctttctacac

SEQ ID NO: 929 - DNA, 122 bp, Homo sapiens
  misc_feature (61)..(62): /note="This region represents a CpG dinucleotide"
  misc_feature (61)..(61): /note="Nucleotide may be methylated to form 5-methylcytosine"
aaaacaatgctgaagacagagaacactctaaatataactgcccaaggggttcacgttgcccgctgcctagacagagccgattcatcaagataggggaattgcaatagagaaagagtaattca

SEQ ID NO: 930 - DNA, 122 bp, Homo sapiens
  misc_feature (61)..(62): /note="This region represents a CpG dinucleotide"
  misc_feature (61)..(61): /note="Nucleotide may be methylated to form 5-methylcytosine"
ataatagttctttcaaatttttgcccgacatgtaaacctccatttttatatgtttttccccgaaggagtttaactccaccaaaggtcaattctaggggaaaaacatgaagcaaataattaaa

SEQ ID NO: 931 - DNA, 122 bp, Homo sapiens
  misc_feature (61)..(62): /note="This region represents a CpG dinucleotide"
  misc_feature (61)..(61): /note="Nucleotide may be methylated to form 5-methylcytosine"
cacaaatggctggaggtgctcggggttagctcccgagggcggcaagcgccgaccggtcctcgctcgctaggcaggcgcctccggattccgttcatgcctctcggagctacagggcttggtgc

SEQ ID NO: 932 - DNA, 122 bp, Homo sapiens
  misc_feature (61)..(62): /note="This region represents a CpG dinucleotide"
  misc_feature (61)..(61): /note="Nucleotide may be methylated to form 5-methylcytosine"
gcgccactccgcggcctaccgcgcagatcctctacgtgtgtcctcgcgagacaagctcaccgaaatggccgcgtccagtcaaggaaacattgagggaaattttgagtcactggaccttacgg

SEQ ID NO: 933 - DNA, 122 bp, Homo sapiens
  misc_feature (61)..(62): /note="This region represents a CpG dinucleotide"
  misc_feature (61)..(61): /note="Nucleotide may be methylated to form 5-methylcytosine"
gctcagcgtttaaatgccgtctgtatttttatccgatgatgggccacttttgaaaaaccccgctcatgctctgcccctctaagaatacatttccatttatagcatctgcacacaggatgttg

SEQ ID NO: 934 - DNA, 122 bp, Homo sapiens
  misc_feature (61)..(62): /note="This region represents a CpG dinucleotide"
  misc_feature (61)..(61): /note="Nucleotide may be methylated to form 5-methylcytosine"
cgcctgcgcctcgccagccgccactgccgcctcgggcgccgccgcctcctcagcctcggccgccgccgcctcagccgccgccgcccccaataatggccagaataaaagtttggcggcggcgg

SEQ ID NO: 935 - DNA, 122 bp, Homo sapiens
  misc_feature (61)..(62): /note="This region represents a CpG dinucleotide"
  misc_feature (61)..(61): /note="Nucleotide may be methylated to form 5-methylcytosine"
gcagcagcagcagcaggaggggccggggggccatggcggggtcggggcgcaggagctgagcgctgcggccacggccccgggcccccgcaaggcccctttatggcggcgcccggaaaggggac

SEQ ID NO: 936 - DNA, 122 bp, Homo sapiens
  misc_feature (61)..(62): /note="This region represents a CpG dinucleotide"
  misc_feature (61)..(61): /note="Nucleotide may be methylated to form 5-methylcytosine"
ctcgctcgcgcagagccccggctcacaccagcggccttaactggagaggcgggaacaggacgcggcccacctccgccaaccactcattggtggtggtgccaggagaggcggggcgctggcag

SEQ ID NO: 937 - DNA, 122 bp, Homo sapiens
  misc_feature (61)..(62): /note="This region represents a CpG dinucleotide"
  misc_feature (61)..(61): /note="Nucleotide may be methylated to form 5-methylcytosine"
taggcgacatagtgagactccatctctacaaaaaatttacaaattagcccagtgtggtggcgcatgcctgtagttctagctactcaggagacaggcagaagaactgcttaagcccaggagtt

SEQ ID NO: 938 - DNA, 122 bp, Homo sapiens
  misc_feature (61)..(62): /note="This region represents a CpG dinucleotide"
  misc_feature (61)..(61): /note="Nucleotide may be methylated to form 5-methylcytosine"
aatggacccctcctcttggccaagggcattccaaagttaatcagcaaaagtagttcaggccgtgataggaagcagagggggtcagacatgccccattatatcctcctctcttttagaattca

SEQ ID NO: 939 - DNA, 122 bp, Homo sapiens
  misc_feature (61)..(62): /note="This region represents a CpG dinucleotide"
  misc_feature (61)..(61): /note="Nucleotide may be methylated to form 5-methylcytosine"
ctggacctcgggctcaagtaattctcacacctcagcctgtccagtagcaggggctacaggcgcgcaccaccatgcccagctaattaaaaatatttttttgtagagacagggtctctctatgt

SEQ ID NO: 940 - DNA, 122 bp, Homo sapiens
  misc_feature (61)..(62): /note="This region represents a CpG dinucleotide"
  misc_feature (61)..(61): /note="Nucleotide may be methylated to form 5-methylcytosine"
actgtttaaaaatcctgataaccgggggaggggagcatcaagataaatagctaatacatgcggagcttaatacctaggtgatgggatgatagttacagcaaaccaccatggcacacatttac

SEQ ID NO: 941 - DNA, 122 bp, Homo sapiens
  misc_feature (61)..(62): /note="This region represents a CpG dinucleotide"
  misc_feature (61)..(61): /note="Nucleotide may be methylated to form 5-methylcytosine"
aaatgtgataatgttctttacttttataaatattacatcgaatgctttctcccttcctgacgtaaatgaataactttaattatagacattattatctatatatgcatgttctgttacagcaa

SEQ ID NO: 942 - DNA, 122 bp, Homo sapiens
  misc_feature (61)..(62): /note="This region represents a CpG dinucleotide"
  misc_feature (61)..(61): /note="Nucleotide may be methylated to form 5-methylcytosine"
ctcccctaccaattgaggcgcccttgttgccaggcttgcggcgggggagcggcgggggagcgacggggatgcgctcattggtcaaggaaggggcgcctgttactagaggcgagaaccggagc

SEQ ID NO: 943 - DNA, 122 bp, Homo sapiens
  misc_feature (61)..(62): /note="This region represents a CpG dinucleotide"
  misc_feature (61)..(61): /note="Nucleotide may be methylated to form 5-methylcytosine"
ttaaccattttattctttcaatattttgagtaagtcatcccactgtcttctggcctccttcgtttctgataaaaaaccagctgtatttcttattaaggatgccttgtatgtgatgaatcacc

SEQ ID NO: 944 - DNA, 122 bp, Homo sapiens
  misc_feature (61)..(62): /note="This region represents a CpG dinucleotide"
  misc_feature (61)..(61): /note="Nucleotide may be methylated to form 5-methylcytosine"
cgccgcatccctccccgattgtgcagggaccgcgagaaggtagtcgggagaatcctgactcggggtgcggggtttatgaatgggaagagctttgatccgtggggttcccagtcactcttttc

SEQ ID NO: 945 - DNA, 122 bp, Homo sapiens
  misc_feature (61)..(62): /note="This region represents a CpG dinucleotide"
  misc_feature (61)..(61): /note="Nucleotide may be methylated to form 5-methylcytosine"
cattttttcaagtcagtactttcccttttccttttaggtattgatgtcaagctgaaccatcgtaggaagttgaaagccttagaaagaggacttggtaaagtttttggattatcttgaaactc

SEQ ID NO: 946 - DNA, 122 bp, Homo sapiens
  misc_feature (61)..(62): /note="This region represents a CpG dinucleotide"
  misc_feature (61)..(61): /note="Nucleotide may be methylated to form 5-methylcytosine"
gctggtggtgttcggcctgatcttcgcgctgggtgtgctgggcaacagcctagtgatcaccgtgctggcgcgcagcaagccgggcaagccgcggagcaccaccaacctgttcatcctcaacc

SEQ ID NO: 947 - DNA, 122 bp, Homo sapiens
  misc_feature (61)..(62): /note="This region represents a CpG dinucleotide"
  misc_feature (61)..(61): /note="Nucleotide may be methylated to form 5-methylcytosine"
aggggagaataatgtcttatttctcttctaccccagctgctagtataatatcttgcataccgtggaagttaaatatgttttgttaataaatgaataaatgtaagcccccagtttcactccca

SEQ ID NO: 948 - DNA, 122 bp, Homo sapiens
  misc_feature (61)..(62): /note="This region represents a CpG dinucleotide"
  misc_feature (61)..(61): /note="Nucleotide may be methylated to form 5-methylcytosine"
agccggccgcgcagggttttgggaaactcctcggaagggcggggcttccaaccgggaggccgtagacgtaggcggggccagacaggcttctaaggggaggtatcttagtgccggctggtggg

SEQ ID NO: 949 - DNA, 122 bp, Homo sapiens
  misc_feature (61)..(62): /note="This region represents a CpG dinucleotide"
  misc_feature (61)..(61): /note="Nucleotide may be methylated to form 5-methylcytosine"
gtttattctaatttatttcacatttcttattcctattatctgaagaatccctcgtctgtgcgtttcttgtgggaagagtgttttaatatcattttagtgctctgaggagtcatatgaagatg

SEQ ID NO: 950 - DNA, 122 bp, Homo sapiens
  misc_feature (61)..(62): /note="This region represents a CpG dinucleotide"
  misc_feature (61)..(61): /note="Nucleotide may be methylated to form 5-methylcytosine"
aagggactcactgctgctctgggtgacagggtccgccttgggggcctctgcttgtaaagacgtacttttcctctccctgattctgttgtctaaatgccaggtgcctttgggatggtgttgaa

SEQ ID NO: 951 - DNA, 122 bp, Homo sapiens
  misc_feature (61)..(62): /note="This region represents a CpG dinucleotide"
  misc_feature (61)..(61): /note="Nucleotide may be methylated to form 5-methylcytosine"
ggctcaggttatcagtttattcatgcagctgatatgctttattgtgccgagtcccatatccgaagtaagttgtagttccttatgaacatgtcagaagaaaacggcatatactgttgtacatg

SEQ ID NO: 952 - DNA, 122 bp, Homo sapiens
  misc_feature (61)..(62): /note="This region represents a CpG dinucleotide"
  misc_feature (61)..(61): /note="Nucleotide may be methylated to form 5-methylcytosine"
atggcaaagtaaaaagctggagtcagtacacagtgttggggtgggggcagcgtttgggggcgacgagttttgtgcaccgcgctggagtaccctgcacataaggtccgctcatgggcttctca

SEQ ID NO: 953 - DNA, 122 bp, Homo sapiens
  misc_feature (61)..(62): /note="This region represents a CpG dinucleotide"
  misc_feature (61)..(61): /note="Nucleotide may be methylated to form 5-methylcytosine"
gggaggttttgcaggcaccatcccactgaaccttcacaacacagctataatgcagattaccgataaagaaactgaggctcaggtaagtaacttgctcaaggttatacagctaaaagcaatag

SEQ ID NO: 954 - DNA, 122 bp, Homo sapiens
  misc_feature (61)..(62): /note="This region represents a CpG dinucleotide"
  misc_feature (61)..(61): /note="Nucleotide may be methylated to form 5-methylcytosine"
ccgcctccctccagtctctgcctccgtgtcccgtggccgcctccctccagtctctgcctccgtgtcccgtggccttctctgtgtgcctgtgtcaaatctcccccaagagttccgtaagaaca

SEQ ID NO: 955 - DNA, 122 bp, Homo sapiens
  misc_feature (61)..(62): /note="This region represents a CpG dinucleotide"
  misc_feature (61)..(61): /note="Nucleotide may be methylated to form 5-methylcytosine"
aggtggccactgaacagcaagtagtcaatgtagacaaaacagccttctattggaagaagacgccatcaaggactttcatagctagagaggtcaatgtctggcctcaaaggccaagctcactc

SEQ ID NO: 956 - DNA, 122 bp, Homo sapiens
  misc_feature (61)..(62): /note="This region represents a CpG dinucleotide"
  misc_feature (61)..(61): /note="Nucleotide may be methylated to form 5-methylcytosine"
aaacacggacgtcagaaaactggttcagtagggatgggtgctagaaggctacggaaccgccgaaggcccaggagaaacccggaacgtgttaaccgctccaactggagccggacgaaaaaacg

SEQ ID NO: 957 - DNA, 122 bp, Homo sapiens
  misc_feature (61)..(62): /note="This region represents a CpG dinucleotide"
  misc_feature (61)..(61): /note="Nucleotide may be methylated to form 5-methylcytosine"
cactttcattttaaaagtgttacttttaatgttctactatatggaaatttggcatctcaacggagccctggcttgttggcccagctccaaaactgaatcctaaagataatcctggcttttcc

SEQ ID NO: 958 - DNA, 122 bp, Homo sapiens
  misc_feature (61)..(62): /note="This region represents a CpG dinucleotide"
  misc_feature (61)..(61): /note="Nucleotide may be methylated to form 5-methylcytosine"
cgcctgcggtcctgggttgggatgtgcgcagcaggcgagtcgggagcaccatcccctgagcgcaacctggtgggccccctggggccgcccctttggcgcccgctagtgcgggaggggctatg

SEQ ID NO: 959 - DNA, 122 bp, Homo sapiens
  misc_feature (61)..(62): /note="This region represents a CpG dinucleotide"
  misc_feature (61)..(61): /note="Nucleotide may be methylated to form 5-methylcytosine"
caacaatcattttaatatatagtcaatggctctttgtggaagggacaaaaagaaactacgcgcagttgttgaatagactttgcgctaggcaaagacaggttaatcgagggccgcatcgcgaa

SEQ ID NO: 960 - DNA, 122 bp, Homo sapiens
  misc_feature (61)..(62): /note="This region represents a CpG dinucleotide"
  misc_feature (61)..(61): /note="Nucleotide may be methylated to form 5-methylcytosine"
cgtcctgcccgcggcactggctgcgggtgccgggccacctgcgagtgtgcggagggattccggacacccgcggcggcgagctgagggagcagtctccacgagaactgaggcggaccctctgg

SEQ ID NO: 961 - DNA, 122 bp, Homo sapiens
  misc_feature (61)..(62): /note="This region represents a CpG dinucleotide"
  misc_feature (61)..(61): /note="Nucleotide may be methylated to form 5-methylcytosine"
gccaggggagggagcgtagcttggttgctccgtagtacggcggctcgcgaggaagaatcccgagcgggctccgggacggacagagaggcgggcggggatggtgtgcggggctgcggctcctg

SEQ ID NO: 962 - DNA, 122 bp, Homo sapiens
  misc_feature (61)..(62): /note="This region represents a CpG dinucleotide"
  misc_feature (61)..(61): /note="Nucleotide may be methylated to form 5-methylcytosine"
atgatggtgatggttgcatgacaatgtaaatgtatttaatgacacaaaattgtacacttccgtggctaagatggtaatgtttgtgttattacttaatcacaatgcaaaaagattacaactta

SEQ ID NO: 963 - DNA, 122 bp, Homo sapiens
  misc_feature (61)..(62): /note="This region represents a CpG dinucleotide"
  misc_feature (61)..(61): /note="Nucleotide may be methylated to form 5-methylcytosine"
caaagagtaagacttacaatgcagattcctgaccattatttagaaaatctctggccagagcgagactctgtcaaaagaaagaaaaagagagagagagaaagagaatctctgatccattgagt

SEQ ID NO: 964 - DNA, 122 bp, Homo sapiens
  misc_feature (61)..(62): /note="This region represents a CpG dinucleotide"
  misc_feature (61)..(61): /note="Nucleotide may be methylated to form 5-methylcytosine"
gcccttaatatataacacctttaaaatgcaggaacagagacccaaaaaccaatagaaaaacggtggcaaatatgaataggcagttcagaaataaaagagattaagttgaccctcaaacttat

SEQ ID NO: 965 - DNA, 122 bp, Homo sapiens
  misc_feature (61)..(62): /note="This region represents a CpG dinucleotide"
  misc_feature (61)..(61): /note="Nucleotide may be methylated to form 5-methylcytosine"
cggtctctgtctcgatcacataatcgctctctttctctttctctatcacgtcctctatctcgctctctgtctcgtctgttatctctagggcggtctcgctctcgttcccggtctctttcacg

SEQ ID NO: 966 - DNA, 122 bp, Homo sapiens
  misc_feature (61)..(62): /note="This region represents a CpG dinucleotide"
  misc_feature (61)..(61): /note="Nucleotide may be methylated to form 5-methylcytosine"
ttgttaagtcataacctaattaaggcttgttggtttcacctgtgaggtcactttttgtaacgttcaaaagctgaaaatcttaacagcttggtgtggctaaagttgagtaacaagggatttaa

SEQ ID NO: 967 - DNA, 122 bp, Homo sapiens
  misc_feature (61)..(62): /note="This region represents a CpG dinucleotide"
  misc_feature (61)..(61): /note="Nucleotide may be methylated to form 5-methylcytosine"
aatggaactctaattccttcctgtaacattatttcaacctgacttacagttttaaactgtcgcaactaatatttgctagagaaaacagaaaagtcacttaaaggataacttatgaaggtcta

SEQ ID NO: 968 - DNA, 122 bp, Homo sapiens
  misc_feature (61)..(62): /note="This region represents a CpG dinucleotide"
  misc_feature (61)..(61): /note="Nucleotide may be methylated to form 5-methylcytosine"
gggctggggcgggagagggtcggggtctgcaagccagcggcccggcgcagcggacttgtccggctgctcagcttggcagctagcgtccgtgccggcaacgctgttaccctctcctgggctgg

SEQ ID NO: 969 - DNA, 122 bp, Homo sapiens
  misc_feature (61)..(62): /note="This region represents a CpG dinucleotide"
  misc_feature (61)..(61): /note="Nucleotide may be methylated to form 5-methylcytosine"
tccgggggcccggggcgccccgccgcccgcgccccccacccccgctgcaggcgccctccccgccgccgtcccccgctgcgcccagctccctcgctgtcacccgctcctgctcgcgcgctctg

SEQ ID NO: 970 - DNA, 122 bp, Homo sapiens
  misc_feature (61)..(62): /note="This region represents a CpG dinucleotide"
  misc_feature (61)..(61): /note="Nucleotide may be methylated to form 5-methylcytosine"
acccaaacctctgtcatcgtcaagagatggaaagatgaggaaatcatgagcaagaacacacgtctttctagccagtcagatgcctggttctatcagtccctgtgtccttggctgtcagtccc

SEQ ID NO: 971 - DNA, 122 bp, Homo sapiens
  misc_feature (61)..(62): /note="This region represents a CpG dinucleotide"
  misc_feature (61)..(61): /note="Nucleotide may be methylated to form 5-methylcytosine"
ttagggaggccgaggtgggcagatcaactgagttcaggagttcgagaccaccatggctaacgtggtaaaaccccatttctactaaaaatacaaaaaagtagccggcgtggtggcgctcgcct

SEQ ID NO: 972 - DNA, 122 bp, Homo sapiens
  misc_feature (61)..(62): /note="This region represents a CpG dinucleotide"
  misc_feature (61)..(61): /note="Nucleotide may be methylated to form 5-methylcytosine"
gttgtgacggaagctccctgggcggggcggggctacaagtgcggtgggcgggggcgggggcgggggcgggggcggggggaggtgcacaactgtaggccgggttctcaagctcgcccttagca

SEQ ID NO: 973 - DNA, 122 bp, Homo sapiens
  misc_feature (61)..(62): /note="This region represents a CpG dinucleotide"
  misc_feature (61)..(61): /note="Nucleotide may be methylated to form 5-methylcytosine"
tctcagaagggttggtcaacctcagctctaatgacattttgaggtacatattctgtattgcgggaggctgtcctctgcactgagatgtttagcagcatccctggcctccacctactagatgc

SEQ ID NO: 974 - DNA, 122 bp, Homo sapiens
  misc_feature (61)..(62): /note="This region represents a CpG dinucleotide"
  misc_feature (61)..(61): /note="Nucleotide may be methylated to form 5-methylcytosine"
ggaggcacaaaatcgctttgtgcgacagcgcccgacagcttctccgcccggagccggctccgccgtgaatgggccgcggacaaaggcgtcccctcccaagtacctgtaattggagcgtccat

SEQ ID NO: 975 - DNA, 122 bp, Homo sapiens
  misc_feature (61)..(62): /note="This region represents a CpG dinucleotide"
  misc_feature (61)..(61): /note="Nucleotide may be methylated to form 5-methylcytosine"
ggggaggggggtcaaggtggcaagcagagctgggggcccagagtccgctcccgtgccgcgcggcgagtcgcttacatgcccaggtcgctgtaggtgttgaagaactccatctgattgcacgc

SEQ ID NO: 976 - DNA, 122 bp, Homo sapiens
  misc_feature (61)..(62): /note="This region represents a CpG dinucleotide"
  misc_feature (61)..(61): /note="Nucleotide may be methylated to form 5-methylcytosine"
ctagagccgggggctgggcggggaccgggcttgtcggtgaagcggcagtggcggcggcggcggcggctcggcaggcgggttcaggcttcgggggccaggtcggttgggtgggtgggtgtctc

SEQ ID NO: 977 - DNA, 122 bp, Homo sapiens
  misc_feature (61)..(62): /note="This region represents a CpG dinucleotide"
  misc_feature (61)..(61): /note="Nucleotide may be methylated to form 5-methylcytosine"
gaattagtgggggcagccaggccccaggaacggagtgcggagagattctgtggtccagtgcgggccggagggcggtggaggagccgggggcgatgccgcggccggggaagagctcgtacagc

SEQ ID NO: 978 - DNA, 122 bp, Homo sapiens
  misc_feature (61)..(62): /note="This region represents a CpG dinucleotide"
  misc_feature (61)..(61): /note="Nucleotide may be methylated to form 5-methylcytosine"
ccccagccccagccccagccgagcacccccggccccgcctgcccggcgttcccttttgtgcggcgctctcccgtccgcatccgcccgatcctctggaactccccgcggacgccggggtccct

SEQ ID NO: 979 - DNA, 122 bp, Homo sapiens
  misc_feature (61)..(62): /note="This region represents a CpG dinucleotide"
  misc_feature (61)..(61): /note="Nucleotide may be methylated to form 5-methylcytosine"
gaaccatgtcaatatttgttaactcaaactcttctgcattcctattaaatatttccaatgcgtcttcatctatgtcaaatccaacacacaacctataaatacaaaacacatacaaagagtgg

SEQ ID NO: 980 - DNA, 122 bp, Homo sapiens
  misc_feature (61)..(62): /note="This region represents a CpG dinucleotide"
  misc_feature (61)..(61): /note="Nucleotide may be methylated to form 5-methylcytosine"
aagctgcctgcattccttggctcatgacccctttccatcttcaaagccagcaatgccagtcggattcttctcatgaggccatctctctggtttttactcttctgtctccctctttcccatgt

SEQ ID NO: 981 - DNA, 122 bp, Homo sapiens
  misc_feature (61)..(62): /note="This region represents a CpG dinucleotide"
  misc_feature (61)..(61): /note="Nucleotide may be methylated to form 5-methylcytosine"
cagaaaccggataatcagcgttaccaatgggcccatcgcattactggcaagcgtttcagtcgcctcgtttctaaaatggtttttccgttttgctgttctgagtctcgggtgctgtgcgtctc

SEQ ID NO: 982 - DNA, 122 bp, Homo sapiens
  misc_feature (61)..(62): /note="This region represents a CpG dinucleotide"
  misc_feature (61)..(61): /note="Nucleotide may be methylated to form 5-methylcytosine"
gatagcggctgcggcgcctgcagtccagatcctcgcagttctgcgggcgaaggaggcgaacggaatcggcccccagtggggagcgcaacaagccacagtagccaaaccccgcgctcctgccc

SEQ ID NO: 983 - DNA, 122 bp, Homo sapiens
  misc_feature (61)..(62): /note="This region represents a CpG dinucleotide"
  misc_feature (61)..(61): /note="Nucleotide may be methylated to form 5-methylcytosine"
atccaagttcttcttcctgtggacagggaacccaggctgcgaactgggaggatgtggcctcgtggggggcagggccagcgtgctgtgatggggatggggctgggcaggttggggctgcctgc

SEQ ID NO: 984 - DNA, 122 bp, Homo sapiens
  misc_feature (61)..(62): /note="This region represents a CpG dinucleotide"
  misc_feature (61)..(61): /note="Nucleotide may be methylated to form 5-methylcytosine"
tctccatgtctgcgtgggttttctctgggtccttcagtttcctcccatgtcccaaagctgcgcacatgaggtgaacaggcgtgcctacatggtccctgtgtgagtgagtgtgggtgtacatg

SEQ ID NO: 985 - DNA, 122 bp, Homo sapiens
  misc_feature (61)..(62): /note="This region represents a CpG dinucleotide"
  misc_feature (61)..(61): /note="Nucleotide may be methylated to form 5-methylcytosine"
gctgagttgcttctctctggaattcactgactgtgccgtcctccgggatatatggccctgcgcttgctccacatcaggccccaggaactgccagcaggtacccgcctgccctgctgcacagt

SEQ ID NO: 986 - DNA, 122 bp, Homo sapiens
  misc_feature (61)..(62): /note="This region represents a CpG dinucleotide"
  misc_feature (61)..(61): /note="Nucleotide may be methylated to form 5-methylcytosine"
ccattctctctctctctctctttctctctctctctctcttgctctactctcgcccgtctgcgttctacattggttctgcggccgtgtccctttcgtgtgtgtctgccctgtgtttctccgtc

SEQ ID NO: 987 - DNA, 122 bp, Homo sapiens
  misc_feature (61)..(62): /note="This region represents a CpG dinucleotide"
  misc_feature (61)..(61): /note="Nucleotide may be methylated to form 5-methylcytosine"
agggctttctgtatcctgggttcttgccctggtatacagaaaaatcacatcacacatgggcgtggagaatgggtgcaaagttttactgagagttggaggtagctctcagagaggtggatggg

SEQ ID NO: 988 - DNA, 122 bp, Homo sapiens
  misc_feature (61)..(62): /note="This region represents a CpG dinucleotide"
  misc_feature (61)..(61): /note="Nucleotide may be methylated to form 5-methylcytosine"
aaaaaaaggaaaaaaactggacttccctggggaaaaatccatttgatgatgtggcttcatcgagtattcctttgtgaattcctggatgaaattttcaaggcaaacaggaaaagcactgaaat

SEQ ID NO: 989 - DNA, 122 bp, Homo sapiens
  misc_feature (61)..(62): /note="This region represents a CpG dinucleotide"
  misc_feature (61)..(61): /note="Nucleotide may be methylated to form 5-methylcytosine"
agagtgagaaaattaattttacaagagaccaatttaccttagcagcaacactcaagacttcgtcatctaatgcaggcaatgaatccacacacagttcatggaaaatgcttgggagcaaaaat

SEQ ID NO: 990 - DNA, 122 bp, Homo sapiens
  misc_feature (61)..(62): /note="This region represents a CpG dinucleotide"
  misc_feature (61)..(61): /note="Nucleotide may be methylated to form 5-methylcytosine"
tgtggtctcagaattcctgtcttaacagttctgctgagctacccatctggcatttcttcacgtgcctggtccctggaggcttggcccttaatcctgaatattgaaatctcaaaagatcaaaa

SEQ ID NO: 991 - DNA, 122 bp, Homo sapiens
  misc_feature (61)..(62): /note="This region represents a CpG dinucleotide"
  misc_feature (61)..(61): /note="Nucleotide may be methylated to form 5-methylcytosine"
gtaattgaatcatgggacaggtctttcccgtgctgttctcgtgatagtgaataagtctcacgagagctgatggttttgtaaaggggagttcacctacacaagcccccttgcctgccgctatg

SEQ ID NO: 992 - DNA, 122 bp, Homo sapiens
  misc_feature (61)..(62): /note="This region represents a CpG dinucleotide"
  misc_feature (61)..(61): /note="Nucleotide may be methylated to form 5-methylcytosine"
ggcagcgctggccacgccgtgggctgggactggcccggaacgcgggtggcggttcggcctcggagacccgcgcagccgtcggagcatctccgtgcctcgctcaccaccttcttttcctccgc

SEQ ID NO: 993 - DNA, 122 bp, Homo sapiens
  misc_feature (61)..(62): /note="This region represents a CpG dinucleotide"
  misc_feature (61)..(61): /note="Nucleotide may be methylated to form 5-methylcytosine"
gctccttctgcgggttggggtgcgaggccggaggccgggccggctgagcgggaggcggagcggggtgggtggggaccagggcggggtcgggctaaagagggatggattcagggcggggtggg

SEQ ID NO: 994 - DNA, 122 bp, Homo sapiens
  misc_feature (61)..(62): /note="This region represents a CpG dinucleotide"
  misc_feature (61)..(61): /note="Nucleotide may be methylated to form 5-methylcytosine"
acactcaaggcaggtgtggaaatgcttagggtctctctgccccacccatacatgggtttacgtatttattgtgaggagctggctctcgcggtgacaggcgctgagaggtctcgggatctgcc

SEQ ID NO: 995 - DNA, 122 bp, Homo sapiens
  misc_feature (61)..(62): /note="This region represents a CpG dinucleotide"
  misc_feature (61)..(61): /note="Nucleotide may be methylated to form 5-methylcytosine"
taggttatgttcttagattcatctggaatataaacacaacattcagtttttatgatagtgcgggttcccccttgggctgtcttaagtatatttaaagccacaagatttggcagcacagcttt

SEQ ID NO: 996 - DNA, 122 bp, Homo sapiens
  misc_feature (61)..(62): /note="This region represents a CpG dinucleotide"
  misc_feature (61)..(61): /note="Nucleotide may be methylated to form 5-methylcytosine"
atcttggctcaccacaacctccaccttctgggttcaagcgattctcctgccttagtctcccgggtagctgcgattacaggctgcaccaccacacccagctaattttgtatttttagtagaga

SEQ ID NO: 997 - DNA, 122 bp, Homo sapiens
  misc_feature (61)..(62): /note="This region represents a CpG dinucleotide"
  misc_feature (61)..(61): /note="Nucleotide may be methylated to form 5-methylcytosine"
caatagcgcagtgagagctacgtccgagcgtcctggaccccctccgcgcgcacacacttgcgcacagcacctctccagctccatgcacgccaggggcctgggaccctgggctccacttctcg

SEQ ID NO: 998 - DNA, 122 bp, Homo sapiens
  misc_feature (61)..(62): /note="This region represents a CpG dinucleotide"
  misc_feature (61)..(61): /note="Nucleotide may be methylated to form 5-methylcytosine"
ttcctctggggcttcaggggtcacgggctccctcccctagatactgccacaggaccaatacggagttgggtcttgctggtgcccaaaggtgctcgtcccagctcctgcacacagtcacctgc

SEQ ID NO: 999 - DNA, 122 bp, Homo sapiens
  misc_feature (61)..(62): /note="This region represents a CpG dinucleotide"
  misc_feature (61)..(61): /note="Nucleotide may be methylated to form 5-methylcytosine"
atgttctaggtgtgatgatacagcactgaccagaaggtctctgccctcaaagagcttacacgccagtggggacagagcaagtactgttaattcctgtgagttaagagctatgaggaaaatca

SEQ ID NO: 1000 - DNA, 122 bp, Homo sapiens
  misc_feature (61)..(62): /note="This region represents a CpG dinucleotide"
  misc_feature (61)..(61): /note="Nucleotide may be methylated to form 5-methylcytosine"
ggcatagggcagcaggcataagccgaggtaaacagcccacatgactcagcgggattggggcgcaagcgcacagtatcatatcttatataatcatagccatgtagacacagcatagagaagct

SEQ ID NO: 1001 - DNA, 122 bp, Homo sapiens
  misc_feature (61)..(62): /note="This region represents a CpG dinucleotide"
  misc_feature (61)..(61): /note="Nucleotide may be methylated to form 5-methylcytosine"
tcaaggggatgccaatcaaagcatcaacttcaaattgtgtctgaaagccccgccgccgagcggagggcggccgccgcagtcggcgcgcgattgcggatccgggcgcagccgggagccgggcg

SEQ ID NO: 1002 - DNA, 122 bp, Homo sapiens
  misc_feature (61)..(62): /note="This region represents a CpG dinucleotide"
  misc_feature (61)..(61): /note="Nucleotide may be methylated to form 5-methylcytosine"
gtgttctataccactgtgggatgactgtcattaacaataatactttatatcatttcaaatcgctagaagaaggatatggaatgtttccaacacaaagaaatgataaatgagatgatgatctg

SEQ ID NO: 1003 - DNA, 122 bp, Homo sapiens
  misc_feature (61)..(62): /note="This region represents a CpG dinucleotide"
  misc_feature (61)..(61): /note="Nucleotide may be methylated to form 5-methylcytosine"
ctcttttctaataaaattactgaagactaaacctacagttctgttacttataaaaatagtcgaggagccatacttttaggaaagaacaggttcaacttaagttttgacaatatcgattaagc

SEQ ID NO: 1004 - DNA, 122 bp, Homo sapiens
  misc_feature (61)..(62): /note="This region represents a CpG dinucleotide"
  misc_feature (61)..(61): /note="Nucleotide may be methylated to form 5-methylcytosine"
ataaaacagataaggagaaggctgtatctaggctgaatggctggccaatgttttcctctccgtcagtataaataaaatggatggaagaaaacacccctggatactatcaaatatgcctttca

SEQ ID NO: 1005 - DNA, 122 bp, Homo sapiens
  misc_feature (61)..(62): /note="This region represents a CpG dinucleotide"
  misc_feature (61)..(61): /note="Nucleotide may be methylated to form 5-methylcytosine"
ttggtttagtgcaatgtgtggtagattacttatcagaaaacatatatgtcatctctagaacgaagaaaaagcatagtagttcaattcccagtgtgtccctttgattttttttttttaatagt

SEQ ID NO: 1006 - DNA, 122 bp, Homo sapiens
  misc_feature (61)..(62): /note="This region represents a CpG dinucleotide"
  misc_feature (61)..(61): /note="Nucleotide may be methylated to form 5-methylcytosine"
ccagagacgcagggacctgcgcgtcgcatccagcgccccctccctctcccgtcccggcgccggcggtgtgcggcaggcaggagcccccacaatcatctgacgagcccacagtgcgcccggcg

SEQ ID NO: 1007 - DNA, 122 bp, Homo sapiens
  misc_feature (61)..(62): /note="This region represents a CpG dinucleotide"
  misc_feature (61)..(61): /note="Nucleotide may be methylated to form 5-methylcytosine"
cctccccattcctgtgtggtttctgaggaggggcagtccttgcccacctacttgtggacgcgcttgtgtggacttggccctgctcgtcatctatcctggtgctttaggacaacaccagttcc

SEQ ID NO: 1008 - DNA, 122 bp, Homo sapiens
  misc_feature (61)..(62): /note="This region represents a CpG dinucleotide"
  misc_feature (61)..(61): /note="Nucleotide may be methylated to form 5-methylcytosine"
cgcaggcccctaggaggccaggtgaggccgcgccccagcttgctccggagctgcaggaggcgccctggtctctgcgcttgacatcacccccgccccccgccaacacccggcctccagtcctt

SEQ ID NO: 1009 - DNA, 122 bp, Homo sapiens
  misc_feature (61)..(62): /note="This region represents a CpG dinucleotide"
  misc_feature (61)..(61): /note="Nucleotide may be methylated to form 5-methylcytosine"
atcccaggtgggaactgagtagacagaggcaatgtggatgtcacagtgatgcagggcaggcgagtcccaaaactagggcttagcacagaagggttcttggctttgcccagaaaagaattcaa

SEQ ID NO: 1010 - DNA, 122 bp, Homo sapiens
  misc_feature (61)..(62): /note="This region represents a CpG dinucleotide"
  misc_feature (61)..(61): /note="Nucleotide may be methylated to form 5-methylcytosine"
taactgatctgtagaagggggtgacaccagttcatgaaaatgcgtacccaccaccacacccgattgttgctcaatgaatggaaggtgttactattgacttattgtcacacactgggggacga

SEQ ID NO: 1011 - DNA, 122 bp, Homo sapiens
  misc_feature (61)..(62): /note="This region represents a CpG dinucleotide"
  misc_feature (61)..(61): /note="Nucleotide may be methylated to form 5-methylcytosine"
ggggaggtgtggggagcggaaggccgcaggagcatctttgcggagaaagtactttggctgcggcgggcgcagggcgggccggctagccccgcgccccacctgttctgtgcgtcgcgctcgcc

SEQ ID NO: 1012 - DNA, 122 bp, Homo sapiens
  misc_feature (61)..(62): /note="This region represents a CpG dinucleotide"
  misc_feature (61)..(61): /note="Nucleotide may be methylated to form 5-methylcytosine"
gatgtaacatgtcaagcagaaatagggagcatgtttacagccattctatgaaaaagtgttcggaatgtacagactagcacagaagctggactaattgaacaagtattgctgaaaatgagtgc

SEQ ID NO: 1013 - DNA, 122 bp, Homo sapiens
  misc_feature (61)..(62): /note="This region represents a CpG dinucleotide"
  misc_feature (61)..(61): /note="Nucleotide may be methylated to form 5-methylcytosine"
tattccccacaaacggagaaaggagggtctgtgttctgcacatacacagacagactcacacggtctggatgatgctttcacaagttaaggggcctcacgcttactcagcagaggaaatcttt

SEQ ID NO: 1014 - DNA, 122 bp, Homo sapiens
  misc_feature (61)..(62): /note="This region represents a CpG dinucleotide"
  misc_feature (61)..(61): /note="Nucleotide may be methylated to form 5-methylcytosine"
ctcctgtacatgttaaataaatagaataaataaccaacatgacaatatttcatacaaatacggtatctgttctgtaagagttgaaagagctccagaaaagaaagtaaaatgaccaaagaaat

SEQ ID NO: 1015 - DNA, 122 bp, Homo sapiens
  misc_feature (61)..(62): /note="This region represents a CpG dinucleotide"
  misc_feature (61)..(61): /note="Nucleotide may be methylated to form 5-methylcytosine"
tacaatgtacacataaatgggtgtgttcagcagcgtccctggcctccatcctccaggtgccggcagcgccacctactccaccaccaggtgtgacaacccacacattgccagggacctgctgg

SEQ ID NO: 1016 - DNA, 122 bp, Homo sapiens
  misc_feature (61)..(62): /note="This region represents a CpG dinucleotide"
  misc_feature (61)..(61): /note="Nucleotide may be methylated to form 5-methylcytosine"
tgctgatgaagtaaaagttgacagtgagaagccttccagcaggagctaccagtgcccactcgcagttcgtgttgtttggataggtgcctggatagccagggctggtgaatgagcctctgtct

SEQ ID NO: 1017 - DNA, 122 bp, Homo sapiens
  misc_feature (61)..(62): /note="This region represents a CpG dinucleotide"
  misc_feature (61)..(61): /note="Nucleotide may be methylated to form 5-methylcytosine"
tttcgagggttgtgggttttcgtgctgaggccagcagttcctgcagagcagaggtgaggtcgggctccaggctagagtcatgtctggtccgcacttgatctctcacccataaatcctttcct

SEQ ID NO: 1018 - DNA, 122 bp, Homo sapiens
  misc_feature (61)..(62): /note="This region represents a CpG dinucleotide"
  misc_feature (61)..(61): /note="Nucleotide may be methylated to form 5-methylcytosine"
ggacccggccgggccagggggacaggcttgttagtgcagcactgaggcccggggacccctcgaggacgcccgcacctcctgccctcccgtgccctccctggtcgctcgaaggctctgcgccg

SEQ ID NO: 1019 - DNA, 122 bp, Homo sapiens
  misc_feature (61)..(62): /note="This region represents a CpG dinucleotide"
  misc_feature (61)..(61): /note="Nucleotide may be methylated to form 5-methylcytosine"
ataggctttggactcaaatggacttgagttccaatcctgcttctaattgctactctatggcgttaaacataagtttcatagtttattagagcttccttatccttagaactgggataatgata

SEQ ID NO: 1020 - DNA, 122 bp, Homo sapiens
  misc_feature (61)..(62): /note="This region represents a CpG dinucleotide"
  misc_feature (61)..(61): /note="Nucleotide may be methylated to form 5-methylcytosine"
gaggcagcgaccagcagcgtggagggagtccagagagctagcctctgcggacggcggaatcgaaattaggctcatttggagactacttcgagaccggtgaggggagccctgtagccaccatc

SEQ ID NO: 1021 - DNA, 122 bp, Homo sapiens
  misc_feature (61)..(62): /note="This region represents a CpG dinucleotide"
  misc_feature (61)..(61): /note="Nucleotide may be methylated to form 5-methylcytosine"
cccggccgaggggatgcagtggactgtgtgtgtctggctgtagcagacgcgaggcggcgacgaggcgccggggacccgcgcgaggggcggccgggaggcggcggcggcggccgccagaagta

SEQ ID NO: 1022 - DNA, 122 bp, Homo sapiens
  misc_feature (61)..(62): /note="This region represents a CpG dinucleotide"
  misc_feature (61)..(61): /note="Nucleotide may be methylated to form 5-methylcytosine"
aaaccgcacagtactgaaaggatgaaaagaaagaaagaaagggccaggggtggtggctcacgcctgtaattctaatgcttcaggaggactgcttgaggacaggagtttgagaccaacctgga

SEQ ID NO: 1023 - DNA, 122 bp, Homo sapiens
  misc_feature (61)..(62): /note="This region represents a CpG dinucleotide"
  misc_feature (61)..(61): /note="Nucleotide may be methylated to form 5-methylcytosine"
ttatcctataactttcactatggtgcccaggcagctgtaggtcaggcttctcatgaccttcgttgtacttcttagatgaaacagaatatttgaagtcactagttacagagaacaagaatcta

SEQ ID NO: 1024 - DNA, 122 bp, Homo sapiens
  misc_feature (61)..(62): /note="This region represents a CpG dinucleotide"
  misc_feature (61)..(61): /note="Nucleotide may be methylated to form 5-methylcytosine"
acgcggggactggaaagggcgcctgggtgggaagaggcgctggcgggtgatcgtccccaccgggccagtccccgggatctgctgccgcccctctccgaaattcacagccagagcgggcgcac

SEQ ID NO: 1025 - DNA, 122 bp, Homo sapiens
  misc_feature (61)..(62): /note="This region represents a CpG dinucleotide"
  misc_feature (61)..(61): /note="Nucleotide may be methylated to form 5-methylcytosine"
ctcgatctcctgacctcgtgatccgcccgcctcggcctcccaaagtgttgggattacaggcgtcagccaccgcgcccggcggtgcaggaattttaaaactcaccaaaatacgccctccttca

SEQ ID NO: 1026 - DNA, 122 bp, Homo sapiens
  misc_feature (61)..(62): /note="This region represents a CpG dinucleotide"
  misc_feature (61)..(61): /note="Nucleotide may be methylated to form 5-methylcytosine"
aaacattcctaagaacagagagcaacaacataaccttctgactcaagatagtctctgttccggtaatttgatgacaaatagtgttgctgatcagcagaatatagagtggaaagggcggcttt

SEQ ID NO: 1027 - DNA, 122 bp, Homo sapiens
  misc_feature (61)..(62): /note="This region represents a CpG dinucleotide"
  misc_feature (61)..(61): /note="Nucleotide may be methylated to form 5-methylcytosine"
ctcagtgttgtgtgtttgtgtgtgtgtgtgtgtgtgtgtgtgtgtgtgtgtgtctgtgcgcgcacgcgtgagagagagagagaatacttacttttatgattaatgcatcttatgaaaatcag

SEQ ID NO: 1028 - DNA, 122 bp, Homo sapiens
  misc_feature (61)..(62): /note="This region represents a CpG dinucleotide"
  misc_feature (61)..(61): /note="Nucleotide may be methylated to form 5-methylcytosine"
tgggcgccgaatctcacccgctgccatggccaaagccggggggtgattttcaaccaatgccgggtggtttcttttttgatctaatggttaagagtgtgttaatttctatgatttttaaattt

SEQ ID NO: 1029 - DNA, 122 bp, Homo sapiens
  misc_feature (61)..(62): /note="This region represents a CpG dinucleotide"
  misc_feature (61)..(61): /note="Nucleotide may be methylated to form 5-methylcytosine"
gacctcttgagtgatttgtgtgctttccggcaaatgatggagacgcgtaaaccggcggaacggctggccttgccatactcgctgcgcaccgcgcccctgggcgttccggggaccctgcccgg

SEQ ID NO: 1030 - DNA, 122 bp, Homo sapiens
  misc_feature (61)..(62): /note="This region represents a CpG dinucleotide"
  misc_feature (61)..(61): /note="Nucleotide may be methylated to form 5-methylcytosine"
ggcacggagctttctcctgcgttgagaggtgttgggggtttattgtcagatgcccacatgcgttagccaaggtccttttctggttctttggaaagtgtagaaatgagagctgcactgtctta

SEQ ID NO: 1031 - DNA, 122 bp, Homo sapiens
  misc_feature (61)..(62): /note="This region represents a CpG dinucleotide"
  misc_feature (61)..(61): /note="Nucleotide may be methylated to form 5-methylcytosine"
gaggagcgcagaggagtcagaggtgagtgatgctggcgtacaccgggcggtcagccaccgcgccccggtctccggacccactgggagcgcggacccctatttgagcagaaaaagaaagggcg

SEQ ID NO: 1032 - DNA, 122 bp, Homo sapiens
  misc_feature (61)..(62): /note="This region represents a CpG dinucleotide"
  misc_feature (61)..(61): /note="Nucleotide may be methylated to form 5-methylcytosine"
ggaggctgcggggtggggacccccatgctggctggcaaggggctctgtgaggcccagagtcgctggggacacggggcgcacgtgtgttttaggtttcgttgggttttttctttttccttttt

SEQ ID NO: 1033 - DNA, 122 bp, Homo sapiens
  misc_feature (61)..(62): /note="This region represents a CpG dinucleotide"
  misc_feature (61)..(61): /note="Nucleotide may be methylated to form 5-methylcytosine"
aactgaaaaaacaactcaccactttattacacaaagttgaaccagatggggctggttctgcgcttacataactggtccaactgtttctgtacctcgcttctgttttctggacatctatttcc

SEQ ID NO: 1034 - DNA, 122 bp, Homo sapiens
  misc_feature (61)..(62): /note="This region represents a CpG dinucleotide"
  misc_feature (61)..(61): /note="Nucleotide may be methylated to form 5-methylcytosine"
caatttattaaagatttcttggcatctgtcaaaaagttcatcaaaattttccgctttgcccgtgtaatatgattgattatggaaatctatttttgaataatgaaaaatatttgaatcttctc

SEQ ID NO: 1035 - DNA, 122 bp, Homo sapiens
  misc_feature (61)..(62): /note="This region represents a CpG dinucleotide"
  misc_feature (61)..(61): /note="Nucleotide may be methylated to form 5-methylcytosine"
cacagtaagtcttgctgctgttcactctttgggtccacagcacctttaaaagttgtaacacgtgctgaggaggtcggcttcactcttgaagtcagcgagaccaccaacccaccagaaggaag

SEQ ID NO: 1036 - DNA, 122 bp, Homo sapiens
  misc_feature (61)..(62): /note="This region represents a CpG dinucleotide"
  misc_feature (61)..(61): /note="Nucleotide may be methylated to form 5-methylcytosine"
atgctcctttgtaatgagctcctttgtaatgagctttgtaatgagctcctttgtaatgagcgtggtatcttgagtggaaagtagatggaactttttcatttttgtcattcctctcatcccag

SEQ ID NO: 1037 - DNA, 122 bp, Homo sapiens
  misc_feature (61)..(62): /note="This region represents a CpG dinucleotide"
  misc_feature (61)..(61): /note="Nucleotide may be methylated to form 5-methylcytosine"
aaacccttgcgatgctgggcagcagcagtgagctgcagctcccagtcagctatatggtcacgagagtagataaccataccctacagtgtactgtgctgccagatgattttgcccaactgcag

SEQ ID NO: 1038 - DNA, 122 bp, Homo sapiens
  misc_feature (61)..(62): /note="This region represents a CpG dinucleotide"
  misc_feature (61)..(61): /note="Nucleotide may be methylated to form 5-methylcytosine"
gccgcagtggtggcggtggcggagagcgcggcggagtgagtgcggctgtggacccgggaccgggcgccgctgggcgggcgcggcagggtcccggatccgtcctccgtgacgcgccggcttcc

SEQ ID NO: 1039 - DNA, 122 bp, Homo sapiens
  misc_feature (61)..(62): /note="This region represents a CpG dinucleotide"
  misc_feature (61)..(61): /note="Nucleotide may be methylated to form 5-methylcytosine"
gaacgggcagagtaagtttgctcccaccgtttcagacctcttaaaggagtcaacgcagaacgtgacctccttgctgaaggagtccacgcaaggagtgagcagcctgttcagggagatcacag

SEQ ID NO: 1040 - DNA, 122 bp, Homo sapiens
  misc_feature (61)..(62): /note="This region represents a CpG dinucleotide"
  misc_feature (61)..(61): /note="Nucleotide may be methylated to form 5-methylcytosine"
ccgcagccgctcggtgcgcacggcgggattgcggggcgcggggctgggggctgggggctgcgggatgcgggcagggccctcgggacccgcactcgggcagtgcctgctgtctgcgtgcattt

SEQ ID NO: 1041 - DNA, 122 bp, Homo sapiens
  misc_feature (61)..(62): /note="This region represents a CpG dinucleotide"
  misc_feature (61)..(61): /note="Nucleotide may be methylated to form 5-methylcytosine"
agacaaacatctatacacatagattcacagtttgcttttacccaacaatagtctcattggcggtgcagcagccagctgaaataattggaagagtgaaacattacattacgtaaggatcttgg

SEQ ID NO: 1042 - DNA, 122 bp, Homo sapiens
  misc_feature (61)..(62): /note="This region represents a CpG dinucleotide"
  misc_feature (61)..(61): /note="Nucleotide may be methylated to form 5-methylcytosine"
gaagtcccagggacctgcggagcgcagacataacacaacacagagcaaaactcaccgctgcggtgactttcactccacgcgatccgcttcccggtttacgctaaactgggcgctcgggacag

SEQ ID NO: 1043 - DNA, 122 bp, Homo sapiens
  misc_feature (61)..(62): /note="This region represents a CpG dinucleotide"
  misc_feature (61)..(61): /note="Nucleotide may be methylated to form 5-methylcytosine"
ctgggttttaagagttctaaaagctccccaggaaattctaatatgtgccaaattgagaaccgctatactcgatcagtgtttcccaatgatagttaatcatcagaatcactttggggaataaa

SEQ ID NO: 1044 - DNA, 122 bp, Homo sapiens
  misc_feature (61)..(62): /note="This region represents a CpG dinucleotide"
  misc_feature (61)..(61): /note="Nucleotide may be methylated to form 5-methylcytosine"
agacaacagcataagggaatggaacatgaaggtaggggacacttttagaataagatgatccgagaaggctcctctgaggaagtgacatttaacctgaaaccttaatgatacgaaggatcaaa

SEQ ID NO: 1045 - DNA, 122 bp, Homo sapiens
  misc_feature (61)..(62): /note="This region represents a CpG dinucleotide"
  misc_feature (61)..(61): /note="Nucleotide may be methylated to form 5-methylcytosine"
ttcactgcaagctataaactctacaagtggtgcgcccgaagtgatcgccttgaagttgcacgtgaaggaggaaaactccttaatttttggggaatcccagtaagggacagtcctgattgcca

SEQ ID NO: 1046 - DNA, 122 bp, Homo sapiens
  misc_feature (61)..(62): /note="This region represents a CpG dinucleotide"
  misc_feature (61)..(61): /note="Nucleotide may be methylated to form 5-methylcytosine"
ttgggtactatatctactatctgagtgacagattcaacagaagcccaaaccttggcatcacgcaatatactcttgtaacaaacctgcacatgtaccccctgaatctaaaatttaaatttaaa

SEQ ID NO: 1047 - DNA, 122 bp, Homo sapiens
  misc_feature (61)..(62): /note="This region represents a CpG dinucleotide"
  misc_feature (61)..(61): /note="Nucleotide may be methylated to form 5-methylcytosine"
agtcacggtccaggggacctctgcagggcgggggcctgggggctgggggggcgatggcctcgggcctgggtgaaaagggcaatgccaggcctgcccgggcagccaggagggccccaagcccc

SEQ ID NO: 1048 - DNA, 122 bp, Homo sapiens
  misc_feature (61)..(62): /note="This region represents a CpG dinucleotide"
  misc_feature (61)..(61): /note="Nucleotide may be methylated to form 5-methylcytosine"
cccagccgcccacccccccgacaggccccgccccattccccgccccccgtctgttcgtcacgcccggctctgccgctccgtcccgcaggccccgccctcatcccgcctcccggcccggcgcg

SEQ ID NO: 1049 - DNA, 122 bp, Homo sapiens
  misc_feature (61)..(62): /note="This region represents a CpG dinucleotide"
  misc_feature (61)..(61): /note="Nucleotide may be methylated to form 5-methylcytosine"
ttaccgccaagtggtttaccaaaacgcggcggaaggaatcaggacagtttgcccgacgggcgggtcggcggctttcaggcgggagagatcttgccaggggcagagagagatcccgaaaatcg

SEQ ID NO: 1050 - DNA, 122 bp, Homo sapiens
  misc_feature (61)..(62): /note="This region represents a CpG dinucleotide"
  misc_feature (61)..(61): /note="Nucleotide may be methylated to form 5-methylcytosine"
ggtcgctccagcagcccggcctcacgcgacccaccattcccgccgccccctcacggtgcccgccgttcccgccgcccggctttctaaccgggcccctagttccccgccccgtgccctctgga

SEQ ID NO: 1051 - DNA, 122 bp, Homo sapiens
  misc_feature (61)..(62): /note="This region represents a CpG dinucleotide"
  misc_feature (61)..(61): /note="Nucleotide may be methylated to form 5-methylcytosine"
tgctgcgcagctaccccaggccggtcccagccgcccggagccccagtgcgcgatggcggccggcaaactgcgcctgcgcactgggcctcaccgcggactacgactcccacaatgccgcgagg

SEQ ID NO: 1052 - DNA, 122 bp, Homo sapiens
  misc_feature (61)..(62): /note="This region represents a CpG dinucleotide"
  misc_feature (61)..(61): /note="Nucleotide may be methylated to form 5-methylcytosine"
gacttaccatgttaccatgttgcccggtctcaaactcctggattcaggcaatcctcactacggcctcccaaagtgctgggattacaggcacaagccacctctcttggccaatttttcttcat

SEQ ID NO: 1053 - DNA, 122 bp, Homo sapiens
  misc_feature (61)..(62): /note="This region represents a CpG dinucleotide"
  misc_feature (61)..(61): /note="Nucleotide may be methylated to form 5-methylcytosine"
tacaaagttacattcctatgcacatgaagacttggccctggagaccagtctgattggttgcgggaggggaccaatcagaggtattttcagtttttcatctgccatgtagaaaaggaggggct

SEQ ID NO: 1054 - DNA, 122 bp, Homo sapiens
  misc_feature (61)..(62): /note="This region represents a CpG dinucleotide"
  misc_feature (61)..(61): /note="Nucleotide may be methylated to form 5-methylcytosine"
aactcctgcacaaatcatttcaaacgcggtcggcttctaatcgggaagtaatctcagtgacgctggcggtgcagagaaccgagtctggacgcacacacacaaacacaccgcgggcctccgca

SEQ ID NO: 1055 - DNA, 122 bp, Homo sapiens
  misc_feature (61)..(62): /note="This region represents a CpG dinucleotide"
  misc_feature (61)..(61): /note="Nucleotide may be methylated to form 5-methylcytosine"
gcgcgcgccgtttctgcctctgggtctcggtgtcccttggccccttcctccccctccccccggtctccggcgcccagcgcccagaccagtccccgccctccagcaggacactcttccctcct

SEQ ID NO: 1056 - DNA, 122 bp, Homo sapiens
  misc_feature (61)..(62): /note="This region represents a CpG dinucleotide"
  misc_feature (61)..(61): /note="Nucleotide may be methylated to form 5-methylcytosine"
acctgctcatggacatgcacgcaaacgtgcaccgcgtggggtacccgtgtacattccacacgcagtgtgtgacacacgtctgaacaagcacacaaacgcacgtgaagatgcacccactacac

SEQ ID NO: 1057 - DNA, 122 bp, Homo sapiens
  misc_feature (61)..(62): /note="This region represents a CpG dinucleotide"
  misc_feature (61)..(61): /note="Nucleotide may be methylated to form 5-methylcytosine"
ggcagaggtggaagaaaatctgtatgtaagtcgacccacacaggtcaaacccatgttgttcgagggtcaacagtatttgaaaaaatactgatagtaatatatgaaaaagagttaaaacctca

SEQ ID NO: 1058 - DNA, 122 bp, Homo sapiens
  misc_feature (61)..(62): /note="This region represents a CpG dinucleotide"
  misc_feature (61)..(61): /note="Nucleotide may be methylated to form 5-methylcytosine"
ggcacgatcctgactcactgcaacctccacctcctgagtaggtgggattacaggcatacccggctaatttttgtttagtagagatgagggttttgccatattgcccaggctggtctcgaact

SEQ ID NO: 1059 - DNA, 122 bp, Homo sapiens
  misc_feature (61)..(62): /note="This region represents a CpG dinucleotide"
  misc_feature (61)..(61): /note="Nucleotide may be methylated to form 5-methylcytosine"
atgaattatttgccaaattctcctgaagttatacctagttcccattaaattaatggacaccgtgtatatgagcatatacctttctttagaactatgttttgtgataagtccatttttactca

SEQ ID NO: 1060 - DNA, 122 bp, Homo sapiens
  misc_feature (61)..(62): /note="This region represents a CpG dinucleotide"
  misc_feature (61)..(61): /note="Nucleotide may be methylated to form 5-methylcytosine"
cctcacctttttcagtttgtagaggctgcctgcatttcttggctcatggcccccttccttcgtctttgaaggctgcgaagttgcatctctctgaccattctttcatagacatatctcctctg

SEQ ID NO: 1061 - DNA, 122 bp, Homo sapiens
  misc_feature (61)..(62): /note="This region represents a CpG dinucleotide"
  misc_feature (61)..(61): /note="Nucleotide may be methylated to form 5-methylcytosine"
actttgagaaacgtgttcactcatgacgctggcaaaagagcttcacttgaaagacagatccgcaaaaatgcatcagagatagaatatgggaccctgcctagggagaggtgagtcacctaagc

SEQ ID NO: 1062 - DNA, 122 bp, Homo sapiens
  misc_feature (61)..(62): /note="This region represents a CpG dinucleotide"
  misc_feature (61)..(61): /note="Nucleotide may be methylated to form 5-methylcytosine"
cctgagtgggatgaggacatcagctgagcagcagtggtgctgctctgcagcttcagcttacgtgttgtcccagccacatagcgctggaagaaacctgcctggaatgtgatcaagtgagttct

SEQ ID NO: 1063 - DNA, 122 bp, Homo sapiens
  misc_feature (61)..(62): /note="This region represents a CpG dinucleotide"
  misc_feature (61)..(61): /note="Nucleotide may be methylated to form 5-methylcytosine"
agcggcgaaccccgccccgccattgccccgccccacgccacacccacctcggctcggtcccgcctctccccgcgcgccccgggctccacctaagccggcacgaggtccactcatggctccgc

SEQ ID NO: 1064 - DNA, 122 bp, Homo sapiens
  misc_feature (61)..(62): /note="This region represents a CpG dinucleotide"
  misc_feature (61)..(61): /note="Nucleotide may be methylated to form 5-methylcytosine"
acagacgtttaagccaaaaatttgaaaaataatcatttttaccttttccctgttcccttgcggcataaatataacatcagaaagtatacctctattaaatgtttccttggtctgtttactct

SEQ ID NO: 1065 - DNA, 122 bp, Homo sapiens
  misc_feature (61)..(62): /note="This region represents a CpG dinucleotide"
  misc_feature (61)..(61): /note="Nucleotide may be methylated to form 5-methylcytosine"
ctgtagtcccagctacttggagggctgaggtgggaggattgcttgagcccaggagtttgacgctgcagtgagcgagattgtgccactcgtaacagagcgagaccctgtctcaccaaaaaaaa

SEQ ID NO: 1066 - DNA, 122 bp, Homo sapiens
  misc_feature (61)..(62): /note="This region represents a CpG dinucleotide"
  misc_feature (61)..(61): /note="Nucleotide may be methylated to form 5-methylcytosine"
tgtaaacagtcccagtctgagtgtgagcgtgtgtatgagtaagccctgcgatgggggtggcgtcctgtccagggctgtttcctgctttgtaccctaagcaggataggctctggccactcatg

SEQ ID NO: 1067 - DNA, 122 bp, Homo sapiens
  misc_feature (61)..(62): /note="This region represents a CpG dinucleotide"
  misc_feature (61)..(61): /note="Nucleotide may be methylated to form 5-methylcytosine"
aaacgaaagcatatatatccatacaaagacctgcacacgaaagctcataacagctttgttcgtaacggacaaacattggaaataacctaaatgtcatcaacaggtgactggataaacacatt

SEQ ID NO: 1068 - DNA, 122 bp, Homo sapiens
  misc_feature (61)..(62): /note="This region represents a CpG dinucleotide"
  misc_feature (61)..(61): /note="Nucleotide may be methylated to form 5-methylcytosine"
cggccgcgcccccggcagcccagggcgcgcttccaccacggtaccggtggattcgccgtgcgcagccggaagatggcgcagacgcacaaagcacaccgatgctgcgccatgatagggccggc

SEQ ID NO: 1069 - DNA, 122 bp, Homo sapiens
  misc_feature (61)..(62): /note="This region represents a CpG dinucleotide"
  misc_feature (61)..(61): /note="Nucleotide may be methylated to form 5-methylcytosine"
gactcacgccgcggaacttgggggctgcagaaggcgagtgcgcggcgggagtcgtcctgccgcaggctcgagtcctcctcctgccaccgtggggtctcggagctgccccgcgctcccgtccc

SEQ ID NO: 1070 - DNA, 122 bp, Homo sapiens
  misc_feature (61)..(62): /note="This region represents a CpG dinucleotide"
  misc_feature (61)..(61): /note="Nucleotide may be methylated to form 5-methylcytosine"
ggcgcccctcgcggccgcacagccgggcgactccgggccgggccccgcccctctcgctggcggactcagcgcgtcctccgccagccctcgcgtctgctgcccccgccatccagttggtgcgg

SEQ ID NO: 1071 - DNA, 122 bp, Homo sapiens
  misc_feature (61)..(62): /note="This region represents a CpG dinucleotide"
  misc_feature (61)..(61): /note="Nucleotide may be methylated to form 5-methylcytosine"
gctctgcgcgggactgcaggttctgccccgcatcggagtgatcgctgagcctgacgctctcgaaggctgggcctggggcccgcaatctactccggaggctttcccactgggcagggtcgcta

SEQ ID NO: 1072 - DNA, 122 bp, Homo sapiens
  misc_feature (61)..(62): /note="This region represents a CpG dinucleotide"
  misc_feature (61)..(61): /note="Nucleotide may be methylated to form 5-methylcytosine"
attttcttttctgatatttctggggacactatatggcaaacaaacccaagtagacaagaccgtagtgaatcatacatctgttgaaatacacaatgtatttgaatatttccttttatgatgag

SEQ ID NO: 1073 - DNA, 122 bp, Homo sapiens
  misc_feature (61)..(62): /note="This region represents a CpG dinucleotide"
  misc_feature (61)..(61): /note="Nucleotide may be methylated to form 5-methylcytosine"
ttgtagtatttgctgatttctatggtgcagatactcccactgtggctggttccaagctaccgatgtgatgtcactgcaggcagcattggggtagatgggatgattaccagctccagcacacc

SEQ ID NO: 1074 - DNA, 122 bp, Homo sapiens
  misc_feature (61)..(62): /note="This region represents a CpG dinucleotide"
  misc_feature (61)..(61): /note="Nucleotide may be methylated to form 5-methylcytosine"
gagcatattgtccttcacctcagatactttgagaagcactgttttaaagcactgcaaagacgggtcatacaagacactcaaacaaggttcagcacgtccccagctgtccctgcagcatccaa

SEQ ID NO: 1075 - DNA, 122 bp, Homo sapiens
  misc_feature (61)..(62): /note="This region represents a CpG dinucleotide"
  misc_feature (61)..(61): /note="Nucleotide may be methylated to form 5-methylcytosine"
ccaccccgcgagtgagtgcggtgcccaggcgcgcttggcctgagaggtcggcagcagacccggcagcgccaaccgcccagccgctctgactgctccggctgcccgcccgcgcggcgcgggct

SEQ ID NO: 1076 - DNA, 122 bp, Homo sapiens
  misc_feature (61)..(62): /note="This region represents a CpG dinucleotide"
  misc_feature (61)..(61): /note="Nucleotide may be methylated to form 5-methylcytosine"
ttatcatttgataatatgcccccggagctcaactgtcttgttatcacgtggagacagtaacggctgggctcattgttttggagaacattattttattttgaaaattattttcctctctgaaa

SEQ ID NO: 1077 - DNA, 122 bp, Homo sapiens
  misc_feature (61)..(62): /note="This region represents a CpG dinucleotide"
  misc_feature (61)..(61): /note="Nucleotide may be methylated to form 5-methylcytosine"
taactatgcatatgtgtacacaaacacacatacacacacacggataaatacctaagcatacgtaattgaatacatttttgctactattattctgaacaaactgttatctgttagatcaatta

SEQ ID NO: 1078 - DNA, 122 bp, Homo sapiens
  misc_feature (61)..(62): /note="This region represents a CpG dinucleotide"
  misc_feature (61)..(61): /note="Nucleotide may be methylated to form 5-methylcytosine"
gtcgccttccagaaaattcactccccagccacctcccgagcctcgggttgggcaagcggccgccgtcttccccgccccgacgcctctcgcggttttccattggctttggctcccctggggta

SEQ ID NO: 1079 - DNA, 122 bp, Homo sapiens
  misc_feature (61)..(62): /note="This region represents a CpG dinucleotide"
  misc_feature (61)..(61): /note="Nucleotide may be methylated to form 5-methylcytosine"
agcgagcaggcggggagggcggggagggtccgcgcgttggtggtgctcgcctcgcagctgcgcccgccggcttcagcaccttccgctgtccgccgctgcagccgcctcctcctccaggtaag

SEQ ID NO: 1080 - DNA, 122 bp, Homo sapiens
  misc_feature (61)..(62): /note="This region represents a CpG dinucleotide"
  misc_feature (61)..(61): /note="Nucleotide may be methylated to form 5-methylcytosine"
cgaaccagcgaagaaagctatcgatcgtaaaacaaaataaacaccaaacaatgttgccgccgcttaaaaaaaaaaaagtggggcggggagagaaggaagggtaattgggaagtggcaatctg

SEQ ID NO: 1081 - DNA, 122 bp, Homo sapiens
  misc_feature (61)..(62): /note="This region represents a CpG dinucleotide"
  misc_feature (61)..(61): /note="Nucleotide may be methylated to form 5-methylcytosine"
caatctcattattcattaatggatggccagtcactgaccacctggcagatactggttttccgtcatctcacactcagctctgtccaaggtgggacaagacccaagtgaagctggtctggggg

SEQ ID NO: 1082 - DNA, 122 bp, Homo sapiens
  misc_feature (61)..(62): /note="This region represents a CpG dinucleotide"
  misc_feature (61)..(61): /note="Nucleotide may be methylated to form 5-methylcytosine"
cctcctgtgctacctcctgaccttgacgggcaactcggcgctggtgctgctggcggtgcgcgacccgcgcctgcacacgcccatgtactacttcctctgccacctggccttggtagacgcgg

SEQ ID NO: 1083 - DNA, 122 bp, Homo sapiens
  misc_feature (61)..(62): /note="This region represents a CpG dinucleotide"
  misc_feature (61)..(61): /note="Nucleotide may be methylated to form 5-methylcytosine"
ctgctactcatataaactgtttcaatgaggctctgtgaaaacgatgtctaacagaacaaccgtatttatagaacagagttttcagatttttttgtgtgtcaatacatgctgtgtgtccttaa

SEQ ID NO: 1084 - DNA, 122 bp, Homo sapiens
  misc_feature (61)..(62): /note="This region represents a CpG dinucleotide"
  misc_feature (61)..(61): /note="Nucleotide may be methylated to form 5-methylcytosine"
tcccaccctcccgggcagactccactcccgccccctccccgtgggtgcccccgccggccccgccctcccaggctgcccccggcgccccgggcctcctccgcgcagtccctgagtcccgcagg

SEQ ID NO: 1085 - DNA, 122 bp, Homo sapiens
  misc_feature (61)..(62): /note="This region represents a CpG dinucleotide"
  misc_feature (61)..(61): /note="Nucleotide may be methylated to form 5-methylcytosine"
ttctgctcacacctcaggcagtcggaggggcccggcggagctgtgttcgtgttgtcatggcgacggaagcagaccattagagcattacgaggaaatgagaagacttggggtcttgcgatcgc

SEQ ID NO: 1086 - DNA, 122 bp, Homo sapiens
  misc_feature (61)..(62): /note="This region represents a CpG dinucleotide"
  misc_feature (61)..(61): /note="Nucleotide may be methylated to form 5-methylcytosine"
tatgagcaaaaattgcatttctctacatttattttttaactttgcaaggtttgtcaccatcgttgtactctaattcacattttaaataagggtttcctaccctttatatgacattttccttt

SEQ ID NO: 1087 - DNA, 122 bp, Homo sapiens
  misc_feature (61)..(62): /note="This region represents a CpG dinucleotide"
  misc_feature (61)..(61): /note="Nucleotide may be methylated to form 5-methylcytosine"
ctgtgggttggggaagagtactctcgtttacagcgaaagaactgaggatccggccggacgcggcggctcacgcttgtaatcccagcactttgggaggctgaggcgggcagatcacctgaggt

SEQ ID NO: 1088 - DNA, 122 bp, Homo sapiens
  misc_feature (61)..(62): /note="This region represents a CpG dinucleotide"
  misc_feature (61)..(61): /note="Nucleotide may be methylated to form 5-methylcytosine"
ggctaagaaggacttgcacaattacataaccatgggtgacatctccagaaagaaaacctccgataaacatgacattttctcttttggggcatttggattcagtgcattttattggcaactgt

SEQ ID NO: 1089 - DNA, 122 bp, Homo sapiens
  misc_feature (61)..(62): /note="This region represents a CpG dinucleotide"
  misc_feature (61)..(61): /note="Nucleotide may be methylated to form 5-methylcytosine"
tttaaccaaagaaaaatctacctatctcttccctcaagggtagagatcccacgctagagacggagtgtcctgggttctgagtgtggaaaggggaaataacagaatgttttcaatagaatatt

SEQ ID NO: 1090 - DNA, 122 bp, Homo sapiens
  misc_feature (61)..(62): /note="This region represents a CpG dinucleotide"
  misc_feature (61)..(61): /note="Nucleotide may be methylated to form 5-methylcytosine"
tctctgaaggcttaactgattttctccggatgaaggttttagagtcccaaggccccataccgtgtctgattttactttatttttgtttgttaagcctaacagcttctgaggagccacctaga

SEQ ID NO: 1091 - DNA, 122 bp, Homo sapiens
  misc_feature (61)..(62): /note="This region represents a CpG dinucleotide"
  misc_feature (61)..(61): /note="Nucleotide may be methylated to form 5-methylcytosine"
aagaatcgtgcgggtctgggacctgggggcccagagggagcgagctcctgcgcgggcgctcggtccgcaggtttcgcaggctcaggggcgtgcctcgttctcacccccactccggaccccgg

SEQ ID NO: 1092 - DNA, 122 bp, Homo sapiens
  misc_feature (61)..(62): /note="This region represents a CpG dinucleotide"
  misc_feature (61)..(61): /note="Nucleotide may be methylated to form 5-methylcytosine"
accatgtgagtaagccatcttggaagcaaatccttcagccccagccaagccttcagataacggcagctccagccagccgtttgactggaacccacctgggccactcttggattcctgagaaa

SEQ ID NO: 1093 - DNA, 122 bp, Homo sapiens
  misc_feature (61)..(62): /note="This region represents a CpG dinucleotide"
  misc_feature (61)..(61): /note="Nucleotide may be methylated to form 5-methylcytosine"
ggggcagcatcaggagtagaacccaagtgtttgtgttctgattcccaagacagcttatgacgttttggaaactctgaatctgatgggtgacagaaacttggggatcatctctagataagaaa

SEQ ID NO: 1094 - DNA, 122 bp, Homo sapiens
  misc_feature (61)..(62): /note="This region represents a CpG dinucleotide"
  misc_feature (61)..(61): /note="Nucleotide may be methylated to form 5-methylcytosine"
cctgaggggggggcgggtgggagccaggtgaatgtacggctcttggcggccgagggggggcgggcggcaggaggaggcagagggcggcggaggaggagccccccagcagcgagcggcgagca

SEQ ID NO: 1095 - DNA, 122 bp, Homo sapiens
  misc_feature (61)..(62): /note="This region represents a CpG dinucleotide"
  misc_feature (61)..(61): /note="Nucleotide may be methylated to form 5-methylcytosine"
ctcagaataaataggtttctcacttcccctgctttgtttttgtttttgttttttttttgccggtgagtaatgtgaagcacacaggttaacttgcccagggttatagtagttaatgatagcct

SEQ ID NO: 1096 - DNA, 122 bp, Homo sapiens
  misc_feature (61)..(62): /note="This region represents a CpG dinucleotide"
  misc_feature (61)..(61): /note="Nucleotide may be methylated to form 5-methylcytosine"
gccccgcggcgagggtgggcacgcccctttcccgcaaccttcgagggaccccacggcaggcggagaccgacttgggaccagggcactgcacccgcccagctagagggtcccggccgaggctg

SEQ ID NO: 1097 - DNA, 122 bp, Homo sapiens
  misc_feature (61)..(62): /note="This region represents a CpG dinucleotide"
  misc_feature (61)..(61): /note="Nucleotide may be methylated to form 5-methylcytosine"
gaattcgtacccacatatttaccaattcagatccatctgtctctgaaagaatttctcctccgctgaattgcaagaacataccctagggtgtgcagtattgcaacttgggcatttcacattag

SEQ ID NO: 1098 - DNA, 122 bp, Homo sapiens
  misc_feature (61)..(62): /note="This region represents a CpG dinucleotide"
  misc_feature (61)..(61): /note="Nucleotide may be methylated to form 5-methylcytosine"
aaaatataaaaagcacaattctatgtatataaggttacataacattttcaaaatcagcaacgttttaattaatttaattaatttagaattctcctgcagaggagttttctctcttttctcca

SEQ ID NO: 1099 - DNA, 122 bp, Homo sapiens
  misc_feature (61)..(62): /note="This region represents a CpG dinucleotide"
  misc_feature (61)..(61): /note="Nucleotide may be methylated to form 5-methylcytosine"
acttgggaggtagatgttgcagtgagctgagatcacagcaatgcactccagcctacagagcgagagacccctctcaaaaaaaaaaaaaaaaaaaaaggagttccttgacaaaagaaatgtgg

SEQ ID NO: 1100 - DNA, 122 bp, Homo sapiens
  misc_feature (61)..(62): /note="This region represents a CpG dinucleotide"
  misc_feature (61)..(61): /note="Nucleotide may be methylated to form 5-methylcytosine"
cctgctgccagcgcttgggctgaggtgaggtgctgctcttagaaagcctgtcacagttggcggtgtggggcgaggaccgcctcagagactgcactgcttgcggctcggctttgcgcctttta

SEQ ID NO: 1101 - DNA, 122 bp, Homo sapiens
  misc_feature (61)..(62): /note="This region represents a CpG dinucleotide"
  misc_feature (61)..(61): /note="Nucleotide may be methylated to form 5-methylcytosine"
ttttatttacaatgtaaaatagaagaatgagctaagggagaagaaaggagattcaagtctcgtcaatctctgaagtacaatgaagtcttacattggtaactggtttggccacccagaagctt

SEQ ID NO: 1102 - DNA, 122 bp, Homo sapiens
  misc_feature (61)..(62): /note="This region represents a CpG dinucleotide"
  misc_feature (61)..(61): /note="Nucleotide may be methylated to form 5-methylcytosine"
acttgggctcctcgtccgaagcgcagggtctttggcgcgctcgcagcttgccgggctctgcgatccctccagtgggcgtctcccggagcagcgtcccgcctgcccactgagcagctctcagc

SEQ ID NO: 1103 - DNA, 122 bp, Homo sapiens
  misc_feature (61)..(62): /note="This region represents a CpG dinucleotide"
  misc_feature (61)..(61): /note="Nucleotide may be methylated to form 5-methylcytosine"
cagtcacatgtctttcactttaagtcaaaagctagaaatgattaagctcagtgagaaaggcgtgttgaaagctgaggtaggttaaaagctggacttcttgcaccagttagcccagtcattag

SEQ ID NO: 1104 - DNA, 122 bp, Homo sapiens
  misc_feature (61)..(62): /note="This region represents a CpG dinucleotide"
  misc_feature (61)..(61): /note="Nucleotide may be methylated to form 5-methylcytosine"
ctggtgagaaaagcactggcagcactgatgttggtgtgagatgatgttgttctttagctacgttaataaagatattgcctttagaatacagaggtgctctacagtgatcattcattcaactg

SEQ ID NO: 1105 - DNA, 122 bp, Homo sapiens
  misc_feature (61)..(62): /note="This region represents a CpG dinucleotide"
  misc_feature (61)..(61): /note="Nucleotide may be methylated to form 5-methylcytosine"
gccctgtcttggccggtggtccccgggcccgcggtcttgttctcctttttccacttcatgcgccggttctgaaaccaaatcttgatctgtctttccgtgaggcagagcgtgtgcgcgatctc

SEQ ID NO: 1106 - DNA, 122 bp, Homo sapiens
  misc_feature (61)..(62): /note="This region represents a CpG dinucleotide"
  misc_feature (61)..(61): /note="Nucleotide may be methylated to form 5-methylcytosine"
cctgcccagacaccccaaacaccgaaactgtcatccgaaggccccgcacctgccgcctgtcggatgctgaagaacgaatcccaggtggagaggacagcaccccaaaagggatgggggatgga

SEQ ID NO: 1107 - DNA, 122 bp, Homo sapiens
  misc_feature (61)..(62): /note="This region represents a CpG dinucleotide"
  misc_feature (61)..(61): /note="Nucleotide may be methylated to form 5-methylcytosine"
ctggcttgcccttggcaggcatcagacccaggcgtagcgtgccaggccgagtggacagaacgagcctagcgggctagagaaaaactcgggcaaagacgccactgtccacagaggtttccagc

SEQ ID NO: 1108 - DNA, 122 bp, Homo sapiens
  misc_feature (61)..(62): /note="This region represents a CpG dinucleotide"
  misc_feature (61)..(61): /note="Nucleotide may be methylated to form 5-methylcytosine"
ctgtgatggaatgtattcttccatgaattaaagcaattttcctctggaactggttgataccgaagatatttatgactcatcaaaacatgatagcttgtgactcttgctcatagaaacccata

SEQ ID NO: 1109 - DNA, 122 bp, Homo sapiens
  misc_feature (61)..(62): /note="This region represents a CpG dinucleotide"
  misc_feature (61)..(61): /note="Nucleotide may be methylated to form 5-methylcytosine"
agcagcagcaggaggggccggggggccatggcggggtcggggcgcaggagctgagcgctgcggccacggccccgggcccccgcaaggcccctttatggcggcgcccggaaaggggacggccc

SEQ ID NO: 1110 - DNA, 122 bp, Homo sapiens
  misc_feature (61)..(62): /note="This region represents a CpG dinucleotide"
  misc_feature (61)..(61): /note="Nucleotide may be methylated to form 5-methylcytosine"
gggaccgcccgccgcgcatctgcccttcttcgctgactccgccccgcatctggccagacccgcctcgcgtcagagctgacccactcactgcgcgtttgccagtcagtctctccggacctgcc

SEQ ID NO: 1111 - DNA, 122 bp, Homo sapiens
  misc_feature (61)..(62): /note="This region represents a CpG dinucleotide"
  misc_feature (61)..(61): /note="Nucleotide may be methylated to form 5-methylcytosine"
catctcaaaaacaaaaacaagtaaatgacatattaaaaattagcaaagagaatagaaatacggatggctaagcaagcacgagaagctaaaataaatgcaaacaccatttgtgcagtccagca

SEQ ID NO: 1112 - DNA, 122 bp, Homo sapiens
  misc_feature (61)..(62): /note="This region represents a CpG dinucleotide"
  misc_feature (61)..(61): /note="Nucleotide may be methylated to form 5-methylcytosine"
atctgttgccatagcttcagtggtttctgtatcactacatgcatcttcatcatcacccatcgtactatggtaaggagtgcttggttcatctattttcattaaaccatagtctttgtctgctg

SEQ ID NO: 1113 - DNA, 122 bp, Homo sapiens
  misc_feature (61)..(62): /note="This region represents a CpG dinucleotide"
  misc_feature (61)..(61): /note="Nucleotide may be methylated to form 5-methylcytosine"
tgccacttaccccctgctgtggggttgggttcctaacaggccatgaaccgggtaccagtccgtgggctggggctggggacccctgcattaggggacaggctcctctgctgttctctttttag

SEQ ID NO: 1114 - DNA, 122 bp, Homo sapiens
  misc_feature (61)..(62): /note="This region represents a CpG dinucleotide"
  misc_feature (61)..(61): /note="Nucleotide may be methylated to form 5-methylcytosine"
atttaaacagtctcagtctagctgtgttatcttgggcaagttctaaactctctgtgcctccgttttctcatctgtaaagtggaaatacggtccttatttcctaggattattttaaggattaa

SEQ ID NO: 1115 - DNA, 122 bp, Homo sapiens
  misc_feature (61)..(62): /note="This region represents a CpG dinucleotide"
  misc_feature (61)..(61): /note="Nucleotide may be methylated to form 5-methylcytosine"
tgaaatctatagaagttcagcctgtgaccaggtctggaagttttgcttaccactctacagcgtgattttaatgttattttttgttcaaaatctgctcttaaaaagaagttgagcagtgccta

SEQ ID NO: 1116 - DNA, 122 bp, Homo sapiens
  misc_feature (61)..(62): /note="This region represents a CpG dinucleotide"
  misc_feature (61)..(61): /note="Nucleotide may be methylated to form 5-methylcytosine"
acgatatttgaaagcatggtccgctggacagagtaaggccgaaacctgggcgcctcgggccggactccggagccgcagctgaatgctcggctcctgggcctaactcggtgacccccaccgcc

SEQ ID NO: 1117 - DNA, 122 bp, Homo sapiens
  misc_feature (61)..(62): /note="This region represents a CpG dinucleotide"
  misc_feature (61)..(61): /note="Nucleotide may be methylated to form 5-methylcytosine"
ggaactggcagaggaaggtctcgaacccacacccgtgggaactccaagtctttgaaagtccgtcccgcccctgcgtgaagaatgggcgcgcggctggactcgtcaccgggggttttagggaa

SEQ ID NO: 1118 - DNA, 122 bp, Homo sapiens
  misc_feature (61)..(62): /note="This region represents a CpG dinucleotide"
  misc_feature (61)..(61): /note="Nucleotide may be methylated to form 5-methylcytosine"
tcccgctcccacagagagtttgagcatggtggtggccaagtaagtaggccacacccctgtcgcaagtcccgagaaggggtcaagggaactctcccatctcagaagtatggcaatttcttata

SEQ ID NO: 1119 - DNA, 122 bp, Homo sapiens
  misc_feature (61)..(62): /note="This region represents a CpG dinucleotide"
  misc_feature (61)..(61): /note="Nucleotide may be methylated to form 5-methylcytosine"
gcctgtcccttgacgccctgcatcctcctccctgactcgcagccccatcggacgctctcccgggaccgccgcaggaccagtttccatagactgcggactggggtcttcctccagcagttact

SEQ ID NO: 1120 - DNA, 122 bp, Homo sapiens
  misc_feature (61)..(62): /note="This region represents a CpG dinucleotide"
  misc_feature (61)..(61): /note="Nucleotide may be methylated to form 5-methylcytosine"
cgcttttgttgtctgagcgcggccgcgggacaagggatgctggcgggcggcaggggcgagcgccgcgggcgagaggcggctcccgacgcgagtgcgcagcgcccggcccggcggcccctccg

SEQ ID NO: 1121 - DNA, 122 bp, Homo sapiens
  misc_feature (61)..(62): /note="This region represents a CpG dinucleotide"
  misc_feature (61)..(61): /note="Nucleotide may be methylated to form 5-methylcytosine"
atctcagaagtagcaccagagggcgatagtcatggggccatcttaaaattctgcctaacacgctgggttcctagttctgctattaattggataggtagacaagatgcttttccttttttttt

SEQ ID NO: 1122 - DNA, 122 bp, Homo sapiens
  misc_feature (61)..(62): /note="This region represents a CpG dinucleotide"
  misc_feature (61)..(61): /note="Nucleotide may be methylated to form 5-methylcytosine"
aggctcagggtcaccaccttcccctctgcttggccggcgccattcttccaaaccactctccgccaaagattccacggacagtcacctacaagacaacccagccgtcctttcagcagcggatc

SEQ ID NO: 1123 - DNA, 122 bp, Homo sapiens
  misc_feature (61)..(62): /note="This region represents a CpG dinucleotide"
  misc_feature (61)..(61): /note="Nucleotide may be methylated to form 5-methylcytosine"
gctattttccatttcattaatgatagccatcctagtggatttgaagtggtaccttattatcgtggttttgattgcattctctattgactaatgatatcgagcatcttttcatgtattttttg

SEQ ID NO: 1124 - DNA, 122 bp, Homo sapiens
  misc_feature (61)..(62): /note="This region represents a CpG dinucleotide"
  misc_feature (61)..(61): /note="Nucleotide may be methylated to form 5-methylcytosine"
tatttcaccctgggctggcaggcagctgttagaggtatttacggccttgccgcagtgcggcggccaggcagccgggtagggtatgcgggggcaccggaagctggggagaagccatgaagaac

SEQ ID NO: 1125 - DNA, 122 bp, Homo sapiens
  misc_feature (61)..(62): /note="This region represents a CpG dinucleotide"
  misc_feature (61)..(61): /note="Nucleotide may be methylated to form 5-methylcytosine"
tcgggctgggccggcagagcggccactttgcgcgcggcctctggagctccagctgcgccccgccaccactggccgctcgcactaccagcctgtctcgcacgctaagtaagtagacagctccc

SEQ ID NO: 1126 - DNA, 122 bp, Homo sapiens
  misc_feature (61)..(62): /note="This region represents a CpG dinucleotide"
  misc_feature (61)..(61): /note="Nucleotide may be methylated to form 5-methylcytosine"
aggactggacggttttccagtcaaatcactccacctatgagccagtgctgctggccaagacgcgctcgtctgagtccatcccacacctgggcgcagacgccggcctgcatgctgcactgcac

SEQ ID NO: 1127 - DNA, 122 bp, Homo sapiens
  misc_feature (61)..(62): /note="This region represents a CpG dinucleotide"
  misc_feature (61)..(61): /note="Nucleotide may be methylated to form 5-methylcytosine"
acttgttcagctacctggaagctccctgaacccagttctcctgggtttttatggaagcttcgtgacaccagcattccttctcccaatgtatagtgtgggaccctctccagagagggtcttaa

SEQ ID NO: 1128 - DNA, 122 bp, Homo sapiens
  misc_feature (61)..(62): /note="This region represents a CpG dinucleotide"
  misc_feature (61)..(61): /note="Nucleotide may be methylated to form 5-methylcytosine"
gggagggctcgtgagagccaatgagagcgcggaaggcggcgagcgagccaatggacgcggcggtggggcagggggcggggcctgggcgaggccgggggcggaatgggctgagtgccctgtct

SEQ ID NO: 1129 - DNA, 122 bp, Homo sapiens
  misc_feature (61)..(62): /note="This region represents a CpG dinucleotide"
  misc_feature (61)..(61): /note="Nucleotide may be methylated to form 5-methylcytosine"
agttaagaaaatgacaatattcctgtgtaatagaagatattatcatttctgtcttatatgcgaatggagtatggttctgagaagcaatttaaaatctcggaactatagaaatccaggcccca

SEQ ID NO: 1130 - DNA, 122 bp, Homo sapiens
  misc_feature (61)..(62): /note="This region represents a CpG dinucleotide"
  misc_feature (61)..(61): /note="Nucleotide may be methylated to form 5-methylcytosine"
tctgagaagtgtcctcctcgctctcttataaaaacaggacttgttgccgaggtcagcgcgcgcatcgagtgtgccaggcgtgtgcgtggtttctgctgtgtcattgctttcacggaaggtgg

SEQ ID NO: 1131 - DNA, 122 bp, Homo sapiens
  misc_feature (61)..(62): /note="This region represents a CpG dinucleotide"
  misc_feature (61)..(61): /note="Nucleotide may be methylated to form 5-methylcytosine"
cgctgcccgcccgggccggcgcgctgctgccctctgcctccatcctggctcgcggctccgcgacctgctgcccagcccgggttcaccgcgctggcccgagcgccttcctgatgctgctgctg

SEQ ID NO: 1132 - DNA, 122 bp, Homo sapiens
  misc_feature (61)..(62): /note="This region represents a CpG dinucleotide"
  misc_feature (61)..(61): /note="Nucleotide may be methylated to form 5-methylcytosine"
ggaaaaataaggaataaaaagtaaacatctggaatatatttttttctttaatttctcaatcgcttggcttcagcttggaatttgatgaggtaaagccagggcctagtcctgttgccatagca

SEQ ID NO: 1133 - DNA, 122 bp, Homo sapiens
  misc_feature (61)..(62): /note="This region represents a CpG dinucleotide"
  misc_feature (61)..(61): /note="Nucleotide may be methylated to form 5-methylcytosine"
ccatgtttttaggggattctgtgctttcccacctaaaaatcatagcactgattcctgtcacggtgctaggcaggagagggtcataccaggtcagaaacacttcttcttctgtgtgcacccat

SEQ ID NO: 1134 - DNA, 122 bp, Homo sapiens
  misc_feature (61)..(62): /note="This region represents a CpG dinucleotide"
  misc_feature (61)..(61): /note="Nucleotide may be methylated to form 5-methylcytosine"
ggagggggcggggttcaggtgcagggcggggctcagaactccgggagaggcggaagccgacgccggagggggcggggctcgagtgaggggcaaggctccaggatcctcgcagcggcctatcc

SEQ ID NO: 1135 - DNA, 122 bp, Homo sapiens
  misc_feature (61)..(62): /note="This region represents a CpG dinucleotide"
  misc_feature (61)..(61): /note="Nucleotide may be methylated to form 5-methylcytosine"
tggggctgatgccattttaggcctcagcccacctgcacccaggcactcattaaaacagcacgctgctccgcactgcctcgtgttgtctgttggcatgctctcagggatcaaaccaattcaag

SEQ ID NO: 1136 - DNA, 122 bp, Homo sapiens
  misc_feature (61)..(62): /note="This region represents a CpG dinucleotide"
  misc_feature (61)..(61): /note="Nucleotide may be methylated to form 5-methylcytosine"
ttcgcgaccaggcctttggcggggtcacccaccaggcggtggaagccgctcaggcaggggcgactcacgatcgaggtgcagcagtcaggccgggaagatcctgcatgttgcgctagggactg

SEQ ID NO: 1137 - DNA, 122 bp, Homo sapiens
  misc_feature (61)..(62): /note="This region represents a CpG dinucleotide"
  misc_feature (61)..(61): /note="Nucleotide may be methylated to form 5-methylcytosine"
cacttgcacacggagtgtggggggccaggcctgggaccaggagctggggccgggcttcggcgcagaggcaggaagaggaagcggcacccgcttcggggacccagccggcggccaggccaccg

SEQ ID NO: 1138 - DNA, 122 bp, Homo sapiens
  misc_feature (61)..(62): /note="This region represents a CpG dinucleotide"
  misc_feature (61)..(61): /note="Nucleotide may be methylated to form 5-methylcytosine"
aatggtagccacggcaggcattttagtcttgggccagagattggagcatttgctttggagcgagggaaaggtccccacagccggaaatgggcagtgagtttggagagtgcctagcagtgggt

SEQ ID NO: 1139 - DNA, 122 bp, Homo sapiens
  misc_feature (61)..(62): /note="This region represents a CpG dinucleotide"
  misc_feature (61)..(61): /note="Nucleotide may be methylated to form 5-methylcytosine"
ggcagcgggaggagttgaagggtaagggagggaaaatcttaccaaagcgaccggctcactcgactgctgattctttcgcttggcatcgcgtcaggggagttagctttccttcagccgggtct

SEQ ID NO: 1140 - DNA, 122 bp, Homo sapiens
  misc_feature (61)..(62): /note="This region represents a CpG dinucleotide"
  misc_feature (61)..(61): /note="Nucleotide may be methylated to form 5-methylcytosine"
gagcctcgggcagaagatgacaggccagccgtggggcaaggaggccgcggaaacgcggaacggcttcggggagacggaagcgcccaatgagattcaccctgcagcccgggtccagcccacct

SEQ ID NO: 1141 - DNA, 122 bp, Homo sapiens
  misc_feature (61)..(62): /note="This region represents a CpG dinucleotide"
  misc_feature (61)..(61): /note="Nucleotide may be methylated to form 5-methylcytosine"
acacccagcccctcatttttatctttaaaaacctttgtcttcctttacctcccttgaatacgcatagtttactaaggcttgtgtattcccattgcaatgctctattcccaaaacaaacatct

SEQ ID NO: 1142 - DNA, 122 bp, Homo sapiens
  misc_feature (61)..(62): /note="This region represents a CpG dinucleotide"
  misc_feature (61)..(61): /note="Nucleotide may be methylated to form 5-methylcytosine"
gaagaagcaaaaggccggggacggggagcagcctcaaagcgacttcaacccaaagggaagcgactccggacccacactgcgaggcctgtattcacctggggtggagtgtacggggattttaa

SEQ ID NO: 1143 - DNA, 122 bp, Homo sapiens
  misc_feature (61)..(62): /note="This region represents a CpG dinucleotide"
  misc_feature (61)..(61): /note="Nucleotide may be methylated to form 5-methylcytosine"
ctccgcccgagaggaagcgtctggccaagatgctgcagctcagcgagagacaggtgagctcgcggggggcctggggccgcctccggggaagggaaggcttctggggtaggggtcgccgggcc

SEQ ID NO: 1144 - DNA, 122 bp, Homo sapiens
  misc_feature (61)..(62): /note="This region represents a CpG dinucleotide"
  misc_feature (61)..(61): /note="Nucleotide may be methylated to form 5-methylcytosine"
tgagcggcgagaaagtgcgagccgggccggcagaatctgcctggcgggcgctggagcctgcgttactcgcggcccgcagccgtccggctactttgcgtttggcccggccagcgcccgggcgc

SEQ ID NO: 1145 - DNA, 122 bp, Homo sapiens
  misc_feature (61)..(62): /note="This region represents a CpG dinucleotide"
  misc_feature (61)..(61): /note="Nucleotide may be methylated to form 5-methylcytosine"
gaatactcttccgcagcgcactattgtgaccagccacttgtgtcttcttccgccaatgtgcgcctctccacatccagccacttgtgtgtctgtctgctagggactttggtttttaaggccca

SEQ ID NO: 1146 - DNA, 122 bp, Homo sapiens
  misc_feature (61)..(62): /note="This region represents a CpG dinucleotide"
  misc_feature (61)..(61): /note="Nucleotide may be methylated to form 5-methylcytosine"
atccctcactgctccacgcctggctcacccatgtcaggtgtgacatccaggccagtagcgcgagccaagcgcagcctgccaggccaaaacaggcagaacgagcccagcaggcccgagcaaaa

SEQ ID NO: 1147 - DNA, 122 bp, Homo sapiens
  misc_feature (61)..(62): /note="This region represents a CpG dinucleotide"
  misc_feature (61)..(61): /note="Nucleotide may be methylated to form 5-methylcytosine"
atacaacagatgttcatgaagtcatccaaaagcattcacaaacacacacgggtgcacagacggttaactctctcatttaacaatcagacaaatccacaatgtggaaaaatctacaacaatct

SEQ ID NO: 1148 - DNA, 122 bp, Homo sapiens
  misc_feature (61)..(62): /note="This region represents a CpG dinucleotide"
  misc_feature (61)..(61): /note="Nucleotide may be methylated to form 5-methylcytosine"
agcctggacaatatagcaagaccccatctccgcaaaagctaaaaagttagccaggtgtggcggcacatgcctgtagtcccagctactcaggaggctgacgtgggaggatcacttgagaccag

SEQ ID NO: 1149 - DNA, 122 bp, Homo sapiens
  misc_feature (61)..(62): /note="This region represents a CpG dinucleotide"
  misc_feature (61)..(61): /note="Nucleotide may be methylated to form 5-methylcytosine"
caaatatgagaaggcttctcattcaggtccatgcttgcctactcctctgtccactgctttcgtgaagacaagatgaagttcacagtgagtagatttttccttttgaatttaccaccaaatga

SEQ ID NO: 1150 - DNA, 122 bp, Homo sapiens
  misc_feature (61)..(62): /note="This region represents a CpG dinucleotide"
  misc_feature (61)..(61): /note="Nucleotide may be methylated to form 5-methylcytosine"
tgtgctattgactttttggggcagaaaatttgttgtggacctttcctgtatgttgtaccacgtggaggtttattggtcttcacccgttaggtaccaatagcctctagttgtgacaacccaaa

SEQ ID NO: 1151 - DNA, 122 bp, Homo sapiens
  misc_feature (61)..(62): /note="This region represents a CpG dinucleotide"
  misc_feature (61)..(61): /note="Nucleotide may be methylated to form 5-methylcytosine"
ggaaacgggcaatgtctcgagacagtgctgattgccacaacttacgggatgagtactactcgtatctagttggcagaggccagatatactgctgagcatcctgcagtgaacacacagttccc

SEQ ID NO: 1152 - DNA, 122 bp, Homo sapiens
  misc_feature (61)..(62): /note="This region represents a CpG dinucleotide"
  misc_feature (61)..(61): /note="Nucleotide may be methylated to form 5-methylcytosine"
ggtctccgcaaggccctcggcaggcaggtgagcgccccggggcctgagcgctacgccgggcgagaggcccgcgcagccccaaccagaacgtaatttgtaattaactgtcatttacttctgtc

SEQ ID NO: 1153 - DNA, 122 bp, Homo sapiens
  misc_feature (61)..(62): /note="This region represents a CpG dinucleotide"
  misc_feature (61)..(61): /note="Nucleotide may be methylated to form 5-methylcytosine"
tagactgacttgtagactggcaagattactgatttcctcaagtttgacactggtagcgtacgtatggttactggaggtgctaatctgagacaaactggtgtgatcaccaacagagaaaagac

SEQ ID NO: 1154 - DNA, 122 bp, Homo sapiens
  misc_feature (61)..(62): /note="This region represents a CpG dinucleotide"
  misc_feature (61)..(61): /note="Nucleotide may be methylated to form 5-methylcytosine"
agccgggtgtggtgacgcgcacctgtgatcctagctactccaagcatgaggtgggaggatcgcttgagcccgggaggtcaaggctgcagtaagctgagatagcgccactgcactccagcctg

SEQ ID NO: 1155 - DNA, 122 bp, Homo sapiens
  misc_feature (61)..(62): /note="This region represents a CpG dinucleotide"
  misc_feature (61)..(61): /note="Nucleotide may be methylated to form 5-methylcytosine"
gtaacatctgccatttataaaatttctgtagagttaatagaacttttcctgaagggaggccggcaatatgcatcatgaattcaagcactaccagtgaagttgtggagtttgaagtggtactc

SEQ ID NO: 1156 - DNA, 122 bp, Homo sapiens
  misc_feature (61)..(62): /note="This region represents a CpG dinucleotide"
  misc_feature (61)..(61): /note="Nucleotide may be methylated to form 5-methylcytosine"
gggagcagtcttggggactgatttcccaacctgtgggatctgaggctatctccagatagacggagtcagaattgaactgaaggacacccagctggtgtctactgcaaaactgattgcttgct

SEQ ID NO: 1157 - DNA, 122 bp, Homo sapiens
  misc_feature (61)..(62): /note="This region represents a CpG dinucleotide"
  misc_feature (61)..(61): /note="Nucleotide may be methylated to form 5-methylcytosine"
gaaagtgcctgccatcaatgtcaacaactccgtcaccaagagcaagtttgacaacctctccggctgccaggagtccctcatagatagcatcaagtgggccacagacgtgatgattgccagca

SEQ ID NO: 1158 - DNA, 122 bp, Homo sapiens
  misc_feature (61)..(62): /note="This region represents a CpG dinucleotide"
  misc_feature (61)..(61): /note="Nucleotide may be methylated to form 5-methylcytosine"
acccagaatgctccagtgctgctgtgcagcaagtgcctcagaaacgcagcttggcaaaggcgtgcagccctgtagcctctaagaagcgtccagctatagctcagtgtgaacatcttcctaaa

SEQ ID NO: 1159 - DNA, 122 bp, Homo sapiens
  misc_feature (61)..(62): /note="This region represents a CpG dinucleotide"
  misc_feature (61)..(61): /note="Nucleotide may be methylated to form 5-methylcytosine"
gtttttaaaagaaaaggtttttatggctgatgaaatgtgagggcaacagggatagccaatcgaactagagagcaagtactgctttaattatttggcagagtgcccagcaaaggtcctttata

SEQ ID NO: 1160 - DNA, 122 bp, Homo sapiens
  misc_feature (61)..(62): /note="This region represents a CpG dinucleotide"
  misc_feature (61)..(61): /note="Nucleotide may be methylated to form 5-methylcytosine"
ggagggcagggtttattgggtgaaatggaagaaaaggggaaacagagactcttagcaaagcgagagagtgtgcttcctgccactgggcttcccgcctcacagattgaatcccaggttccacc

SEQ ID NO: 1161 - DNA, 122 bp, Homo sapiens
  misc_feature (61)..(62): /note="This region represents a CpG dinucleotide"
  misc_feature (61)..(61): /note="Nucleotide may be methylated to form 5-methylcytosine"
caggaccaataggatctacgtatatatgagagggactttattaaggagaattgactcacacgatcacaaggtcaagtcccatgataagccgcctgcaagttgaggatcaaggaagccagcag

SEQ ID NO: 1162 - DNA, 122 bp, Homo sapiens
  misc_feature (61)..(62): /note="This region represents a CpG dinucleotide"
  misc_feature (61)..(61): /note="Nucleotide may be methylated to form 5-methylcytosine"
tcacttcatttcgttcaatttcgttcaatttcattccttttcatccagcgccgggaggcccgaggccacaaggaaggggagggggtctttccgggcgaatttccctcatcttgtagatttac

SEQ ID NO: 1163 - DNA, 122 bp, Homo sapiens
  misc_feature (61)..(62): /note="This region represents a CpG dinucleotide"
  misc_feature (61)..(61): /note="Nucleotide may be methylated to form 5-methylcytosine"
cccaaatcttgtattagaatataatccccagtgttggaggtggggcctggtggaagtgaccggatcataggggcagatttctcatgagtgatttagcaccagcccccttggtattgtcctag

SEQ ID NO: 1164 - DNA, 122 bp, Homo sapiens
  misc_feature (61)..(62): /note="This region represents a CpG dinucleotide"
  misc_feature (61)..(61): /note="Nucleotide may be methylated to form 5-methylcytosine"
tcttcaagtgacagctaaagacaagggtacaaggtacaaaaataagatcacaattaccaacgaccagaatcacctgacacctgaagatattgaaaggatggttaatgatgctgagaagtttg

SEQ ID NO: 1165 - DNA, 122 bp, Homo sapiens
  misc_feature (61)..(62): /note="This region represents a CpG dinucleotide"
  misc_feature (61)..(61): /note="Nucleotide may be methylated to form 5-methylcytosine"
tacttagaacggcagccaacacctagcaggtgctcagtaaacatttgttaaatgaacgagcgaatgagtgaatgagtgaacggaatgcagcagctgattcatgtttcccattcccaaacctc

SEQ ID NO: 1166 - DNA, 122 bp, Homo sapiens
  misc_feature (61)..(62): /note="This region represents a CpG dinucleotide"
  misc_feature (61)..(61): /note="Nucleotide may be methylated to form 5-methylcytosine"
gaccgacgagcaaccgtctgaggccaggagcgctgcgacggagccttgaccgccgttgcccggccctctcccgcgcagccccgggcttccgcaggtacctgtgctcgcccccgggaaggggc

SEQ ID NO: 1167 - DNA, 122 bp, Homo sapiens
  misc_feature (61)..(62): /note="This region represents a CpG dinucleotide"
  misc_feature (61)..(61): /note="Nucleotide may be methylated to form 5-methylcytosine"
atagtaacagtattagctaaaacagcttttatcagaaatacctgaaacctcctaattatccgatttattgggcttccaagtgagttttccagaattgtttcactgtttacttaaaaaatgat

SEQ ID NO: 1168 - DNA, 122 bp, Homo sapiens
  misc_feature (61)..(62): /note="This region represents a CpG dinucleotide"
  misc_feature (61)..(61): /note="Nucleotide may be methylated to form 5-methylcytosine"
tggagtcagtacacagtgttggggtgggggcagcgtttgggggcgacgagttttgtgcaccgcgctggagtaccctgcacataaggtccgctcatgggcttctcagtacggactcgccggcg

SEQ ID NO: 1169 - DNA, 122 bp, Homo sapiens
  misc_feature (61)..(62): /note="This region represents a CpG dinucleotide"
  misc_feature (61)..(61): /note="Nucleotide may be methylated to form 5-methylcytosine"
cccgcggcccggcccccagcggccggcctcccgcggccccgcccccgccgccccagtccccgcccctcgcgccttcgtttattcctccgcgcgctgggacaggctgcttcttcgccagaacc

SEQ ID NO: 1170 - DNA, 122 bp, Homo sapiens
  misc_feature (61)..(62): /note="This region represents a CpG dinucleotide"
  misc_feature (61)..(61): /note="Nucleotide may be methylated to form 5-methylcytosine"
atctttagctatctcaacatcaaaaagaaaaaagctgaggttttcaagaatgtgtgcacacgtgcagtgtgtatgtgcatgtttgtgatttattgagggctaaaaagagagctgatattccc

SEQ ID NO: 1171 - DNA, 122 bp, Homo sapiens
  misc_feature (61)..(62): /note="This region represents a CpG dinucleotide"
  misc_feature (61)..(61): /note="Nucleotide may be methylated to form 5-methylcytosine"
ggtctgcacaccctagaatttaagcttcttgatggtacaggcagcacatgcacacaaacccgtggtaccaggaagccacaccaggcgccatttgagtattacttacatactgggcagctttc

SEQ ID NO: 1172 - DNA, 122 bp, Homo sapiens
  misc_feature (61)..(62): /note="This region represents a CpG dinucleotide"
  misc_feature (61)..(61): /note="Nucleotide may be methylated to form 5-methylcytosine"
acgcctggcaggagctatataaggcggcgtgaggcaggcgaggggggcagcgcagccgagcggagcccaggagagcagagagcgagcctgagcgagagacggggaagcacggaggaggaagc

SEQ ID NO: 1173 - DNA, 122 bp, Homo sapiens
  misc_feature (61)..(62): /note="This region represents a CpG dinucleotide"
  misc_feature (61)..(61): /note="Nucleotide may be methylated to form 5-methylcytosine"
tttagtttgtcccattttctgtagcaaggttttatacacatacacacacacacaaacacacgcacacagcgtcttaaacataagttgatggagtgtgaaactgcacttcatttactgcataa

SEQ ID NO: 1174 - DNA, 122 bp, Homo sapiens
  misc_feature (61)..(62): /note="This region represents a CpG dinucleotide"
  misc_feature (61)..(61): /note="Nucleotide may be methylated to form 5-methylcytosine"
agtcattgagcagggctggcgccaggatcagaatcaccaggggtgagtaaaaagatctcacgcccaggccttctggttctctaggtatggggtgagtgggtctcgcatctgtacttgtgaag

SEQ ID NO: 1175 - DNA, 122 bp, Homo sapiens
  misc_feature (61)..(62): /note="This region represents a CpG dinucleotide"
  misc_feature (61)..(61): /note="Nucleotide may be methylated to form 5-methylcytosine"
agggaatgttgtgcctggttaaatcttttatccagacccctaaatctttctccatatcagcgataaggcaattacactttatcatttatatgtccatgtaagtagcaattttaattaccttc

SEQ ID NO: 1176 - DNA, 122 bp, Homo sapiens
  misc_feature (61)..(62): /note="This region represents a CpG dinucleotide"
  misc_feature (61)..(61): /note="Nucleotide may be methylated to form 5-methylcytosine"
tcgcgccggccggagagggggaccgttcttaaaggggcgatggcgcggcctctcgggtagcgaggggcggcgccgcggccccaggacagacctgcagctgaggggagcccgccctggacgcg

SEQ ID NO: 1177 - DNA, 122 bp, Homo sapiens
  misc_feature (61)..(62): /note="This region represents a CpG dinucleotide"
  misc_feature (61)..(61): /note="Nucleotide may be methylated to form 5-methylcytosine"
aacatggcgatgccctcaggaggcactgtccatctgcagcctgctgcccaaagcacaaaccggttgatcttcattggtgtgagttggacatcaccagcacaatctccctcctgttgtttaca

SEQ ID NO: 1178 - DNA, 122 bp, Homo sapiens
  misc_feature (61)..(62): /note="This region represents a CpG dinucleotide"
  misc_feature (61)..(61): /note="Nucleotide may be methylated to form 5-methylcytosine"
tggttgggcatctgctgtccagaataaagactacattttccagcctcctttgcagctggacgtggtcatgtgaccgcatttaggtggcatgtaaatggaggcactgtgtggcagcttctgga

SEQ ID NO: 1179 - DNA, 122 bp, Homo sapiens
  misc_feature (61)..(62): /note="This region represents a CpG dinucleotide"
  misc_feature (61)..(61): /note="Nucleotide may be methylated to form 5-methylcytosine"
ttcttctactctgttttgctttcactttactgtgttggcttgctcttaaattctttcctacgtgaagccaagaaccctcctggggtgagccccaattttggggtttgtctgcctcagatggg

SEQ ID NO: 1180 - DNA, 122 bp, Homo sapiens
  misc_feature (61)..(62): /note="This region represents a CpG dinucleotide"
  misc_feature (61)..(61): /note="Nucleotide may be methylated to form 5-methylcytosine"
tttccccacggcgtttcgtgcaacgccgcagcccgaccttcgactgcagggtgcgcccgccgttccaggcgccagctccggtcctgcctgccttcgcaggatgcaggatgcgtaacttcgag

SEQ ID NO: 1181 - DNA, 122 bp, Homo sapiens
  misc_feature (61)..(62): /note="This region represents a CpG dinucleotide"
  misc_feature (61)..(61): /note="Nucleotide may be methylated to form 5-methylcytosine"
gttccttttcaactggcctgcctgctcataatataaagcagatgatttcatctttcacagcgcctttttgctacagtgaactgaagtctgcagagttcagacttctctaataacatccatgt

SEQ ID NO: 1182 - DNA, 122 bp, Homo sapiens
  misc_feature (61)..(62): /note="This region represents a CpG dinucleotide"
  misc_feature (61)..(61): /note="Nucleotide may be methylated to form 5-methylcytosine"
ggatttcaacatatacatcttggggagggggacaacaaacattcagaccataacactatgcgtgcccctgagttcctctgtgagttcccctgtgggatctggctgaggccagacacaaaact

SEQ ID NO: 1183 - DNA, 122 bp, Homo sapiens
  misc_feature (61)..(62): /note="This region represents a CpG dinucleotide"
  misc_feature (61)..(61): /note="Nucleotide may be methylated to form 5-methylcytosine"
aaaatcatagagacagaaaacgagagagaattcaagctgaggaacaaaatgaacagtctacgtaaaagctccagtttagtccccacaaagcatgaccaagagaagctgggaaaacccagaat

SEQ ID NO: 1184 - DNA, 122 bp, Homo sapiens
  misc_feature (61)..(62): /note="This region represents a CpG dinucleotide"
  misc_feature (61)..(61): /note="Nucleotide may be methylated to form 5-methylcytosine"
gcattccctgatcaccacatccacaccaacatctgctcttctttgattttttgaatttttcgaatatggccattcttgcatgagtaaggtggtagcacattgtggttttgatttgcatttct

SEQ ID NO: 1185 - DNA, 122 bp, Homo sapiens
  misc_feature (61)..(62): /note="This region represents a CpG dinucleotide"
  misc_feature (61)..(61): /note="Nucleotide may be methylated to form 5-methylcytosine"
gtcagataataattctctgtccacttcacctagtgaagtaccttagccaccagagactctcggctatttgctttcttcttcttctgcgtagcacttatgattctcagtttattttggtaata

SEQ ID NO: 1186 - DNA, 122 bp, Homo sapiens
  misc_feature (61)..(62): /note="This region represents a CpG dinucleotide"
  misc_feature (61)..(61): /note="Nucleotide may be methylated to form 5-methylcytosine"
ttctctggctggacgctgctcaatccactgcctagcaggtggcccattccagttggagaacgtagtgagtctttcagtggagccagggtctggtaagtctcctagcagggtctgggggagag

SEQ ID NO: 1187 - DNA, 122 bp, Homo sapiens
  misc_feature (61)..(62): /note="This region represents a CpG dinucleotide"
  misc_feature (61)..(61): /note="Nucleotide may be methylated to form 5-methylcytosine"
aaaaaaattatggctttttatatctcccagaataaagccaacaatgactctggggctgggcgtggtggctcacacctgtaatctcagtactttgggaggacaaggcgggtggactgcttgag

SEQ ID NO: 1188 - DNA, 122 bp, Homo sapiens
  misc_feature (61)..(62): /note="This region represents a CpG dinucleotide"
  misc_feature (61)..(61): /note="Nucleotide may be methylated to form 5-methylcytosine"
taaaacgcgcgggtgggattggttctttttattttctgaaaggagatgggactgaaaaaacgacttttaattgcatatgctctcccgagccccgagctttttggagatgtggtggctgcacc

SEQ ID NO: 1189 - DNA, 122 bp, Homo sapiens
  misc_feature (61)..(62): /note="This region represents a CpG dinucleotide"
  misc_feature (61)..(61): /note="Nucleotide may be methylated to form 5-methylcytosine"
tcataagaagcttgcatcctagatcctagatccctcccatgcagaattcacaatagaattcgcactccaatgggaatctaatgctagggctcatctgacaggaggtggagctcaggtggtaa

SEQ ID NO: 1190 - DNA, 122 bp, Homo sapiens
  misc_feature (61)..(62): /note="This region represents a CpG dinucleotide"
  misc_feature (61)..(61): /note="Nucleotide may be methylated to form 5-methylcytosine"
ctggcgcgctgagggcggtgagcgagggcgccaaggcacaggtggggcgggagtcgagcgcggaggctcggggggcgggacgcggggcctgggagcggccagggaccgcggcagcgcctcag

SEQ ID NO: 1191 - DNA, 122 bp, Homo sapiens
  misc_feature (61)..(62): /note="This region represents a CpG dinucleotide"
  misc_feature (61)..(61): /note="Nucleotide may be methylated to form 5-methylcytosine"
tcactccatcctgagcttcccagctgctgcctctgctccgaactcccacggggaaagcagcgtctctaggaccaggggctccgagcatggcacagcgccaactctcgtctcttgccgcctcc

SEQ ID NO: 1192 - DNA, 122 bp, Homo sapiens
  misc_feature (61)..(62): /note="This region represents a CpG dinucleotide"
  misc_feature (61)..(61): /note="Nucleotide may be methylated to form 5-methylcytosine"
gtatatatatatatgcattattctcaatagccaaaatgtgtaagcaacccaggtggccatcgacagatgaatggataaataaaatgtggtccatccatcaaatggattattattcagcctca

SEQ ID NO: 1193 - DNA, 122 bp, Homo sapiens
  misc_feature (61)..(62): /note="This region represents a CpG dinucleotide"
  misc_feature (61)..(61): /note="Nucleotide may be methylated to form 5-methylcytosine"
tattcttccctaaaccaggggtccccaactcctaagccacagaccagccacacagagcagcgggcaagggagcgaagcttcatctgtatttacagctgatccccatcgccgatgttaccgcc

SEQ ID NO: 1194 - DNA, 122 bp, Homo sapiens
  misc_feature (61)..(62): /note="This region represents a CpG dinucleotide"
  misc_feature (61)..(61): /note="Nucleotide may be methylated to form 5-methylcytosine"
aagatcaagttgcagcaggtttgatgtctggtgagggtgacactcttcacttcaagatggcgtcttgtcactgcatcctcacatggtgagggacagaaggacaaaaagggatgaatgctgtg

SEQ ID NO: 1195 - DNA, 122 bp, Homo sapiens
  misc_feature (61)..(62): /note="This region represents a CpG dinucleotide"
  misc_feature (61)..(61): /note="Nucleotide may be methylated to form 5-methylcytosine"
gtaaaaatatggtattatcatcttatgggaccaccatcatatatgtggtgtgtcattgaccgaaatgtcataatgcacattactataaatgtttttaaagtgaataaaaattattgaagtat

SEQ ID NO: 1196 - DNA, 122 bp, Homo sapiens
  misc_feature (61)..(62): /note="This region represents a CpG dinucleotide"
  misc_feature (61)..(61): /note="Nucleotide may be methylated to form 5-methylcytosine"
ctgtttgggagggcagctgtctttgaaaaggtaagaagtctatggccataccaccctgaacgtgctggatctcatctgacaaagtaatgaaaactacggcttctcccaagaaaattgcacat

SEQ ID NO: 1197 - DNA, 122 bp, Homo sapiens
  misc_feature (61)..(62): /note="This region represents a CpG dinucleotide"
  misc_feature (61)..(61): /note="Nucleotide may be methylated to form 5-methylcytosine"
ccgcgcctgcctagcccggctctcaggacacctctgtctgcgtctccttcgtcgccactccgggtttcgactccgcgtggccaggcaccccgggtcaccacctctcgacccagggcgagctc

SEQ ID NO: 1198 - DNA, 122 bp, Homo sapiens
  misc_feature (61)..(62): /note="This region represents a CpG dinucleotide"
  misc_feature (61)..(61): /note="Nucleotide may be methylated to form 5-methylcytosine"
aatggaaagctgtaaaggccacaagctacaaattaggctttcttcttctgtgaaagccagcgataaaatatctaccagaatatcactgcttctcatcctgcactctaactctccatgttgct

SEQ ID NO: 1199 - DNA, 122 bp, Homo sapiens
  misc_feature (61)..(62): /note="This region represents a CpG dinucleotide"
  misc_feature (61)..(61): /note="Nucleotide may be methylated to form 5-methylcytosine"
acttgagagacagacagacagatacagaaaaatgacaaaatatcacagcagaaaactctacgggaagcagtgctagggtagaaaaacctgaactgtaacctactaattgctcaagtatgaaa

SEQ ID NO: 1200 - DNA, 122 bp, Homo sapiens
  misc_feature (61)..(62): /note="This region represents a CpG dinucleotide"
  misc_feature (61)..(61): /note="Nucleotide may be methylated to form 5-methylcytosine"
aaggaaactgacagaggaagacatttcacagctattagagcaatcagtagatgaatgcaacgcgacaaacagcagcactctagactgtaatgatgaggtaaaagcatcgtatgagcaaaatc

SEQ ID NO: 1201 - DNA, 122 bp, Homo sapiens
  misc_feature (61)..(62): /note="This region represents a CpG dinucleotide"
  misc_feature (61)..(61): /note="Nucleotide may be methylated to form 5-methylcytosine"
taggaagtgaggagcacctcttcccggctgccatcccatgtaggaagtgaggagcgtctccgccccaccgcccattgtctgagatgtggggagtgcctctgccccccgccccatctgggatg

SEQ ID NO: 1202 - DNA, 122 bp, Homo sapiens
  misc_feature (61)..(62): /note="This region represents a CpG dinucleotide"
  misc_feature (61)..(61): /note="Nucleotide may be methylated to form 5-methylcytosine"
aagacaggagttcctgagccctgaacaagaggctacctagggtaaagcgattgatctccgcgcggtgcggctgagaagagaaggcgttgttgacctttcggggagcaagttaataactcagc

SEQ ID NO: 1203 - DNA, 122 bp, Homo sapiens
  misc_feature (61)..(62): /note="This region represents a CpG dinucleotide"
  misc_feature (61)..(61): /note="Nucleotide may be methylated to form 5-methylcytosine"
agggacactgccatgaataaccagcatggacttgcttctgaggagctcccactttggaagcgtttttaggaaggaaagaaggtgttctgaaaagcagaagctgggccacagaggagactgca

SEQ ID NO: 1204 - DNA, 122 bp, Homo sapiens
  misc_feature (61)..(62): /note="This region represents a CpG dinucleotide"
  misc_feature (61)..(61): /note="Nucleotide may be methylated to form 5-methylcytosine"
cggcgcaggccccgcacccccgactctgcccgccctctgttacggacacccgctgggccacgtggtcgcgactggcttctcccagcggccagcctggccaccccgactcccagggaggggga

SEQ ID NO: 1205 - DNA, 122 bp, Homo sapiens
  misc_feature (61)..(62): /note="This region represents a CpG dinucleotide"
  misc_feature (61)..(61): /note="Nucleotide may be methylated to form 5-methylcytosine"
gcgggggctccccgctacctgcgcgcctgctgctcccaccacgcggcaccgacccgggcgcgcccccggcccctgtccgcagcccacagccacaccgcgcaccctacaccctccttgcgcct

SEQ ID NO: 1206 - DNA, 122 bp, Homo sapiens
  misc_feature (61)..(62): /note="This region represents a CpG dinucleotide"
  misc_feature (61)..(61): /note="Nucleotide may be methylated to form 5-methylcytosine"
gagtctgtccccttcctttttcctctttcaggaggacgctgccttctcagccctctgctgcggcagtaagcatgcttaagtgtgagtatcctgaaaaaagcaagcaaacaaacaaacaaaca

SEQ ID NO: 1207 - DNA, 122 bp, Homo sapiens
  misc_feature (61)..(62): /note="This region represents a CpG dinucleotide"
  misc_feature (61)..(61): /note="Nucleotide may be methylated to form 5-methylcytosine"
catcacttttaatggcaaaatccacaattgcttttgcaccaacctaatagcatttaataacgtaaatatagctgggaaatctcaaaatatttaaacatacacagtacacttcaaaataacgc

SEQ ID NO: 1208 - DNA, 122 bp, Homo sapiens
  misc_feature (61)..(62): /note="This region represents a CpG dinucleotide"
  misc_feature (61)..(61): /note="Nucleotide may be methylated to form 5-methylcytosine"
ttaatttatttcctcagtgtttattgtttctggtataaggctctttcacttccttggtcacgtttactcccagtagcttattggtttatttatgtttgatgcaattgtaaattgaatagatc

SEQ ID NO: 1209 - DNA, 122 bp, Homo sapiens
  misc_feature (61)..(62): /note="This region represents a CpG dinucleotide"
  misc_feature (61)..(61): /note="Nucleotide may be methylated to form 5-methylcytosine"
gtcgctccgctccgttccagacgccgccgccgggcgggaccctgctccctggattggggacgctgactcccccaaaagcttgactgtgccggaggaggtcaggggcacttcgtcccccagga

SEQ ID NO: 1210 - DNA, 122 bp, Homo sapiens
  misc_feature (61)..(62): /note="This region represents a CpG dinucleotide"
  misc_feature (61)..(61): /note="Nucleotide may be methylated to form 5-methylcytosine"
ccattatgacctcattttaaccaattatatctggaccaaccttattttcaaataaggtcacggtctgaggtcctgggctttaagacttcaacatataaattttagatgggcacaattcaacc

SEQ ID NO: 1211 - DNA, 122 bp, Homo sapiens
  misc_feature (61)..(62): /note="This region represents a CpG dinucleotide"
  misc_feature (61)..(61): /note="Nucleotide may be methylated to form 5-methylcytosine"
agcgcctctatcctgcgctccttggcgtacgcagccgggcgaggtcgcggcgggaatgggcgccgaggccctgcccgccagggccgcatctgcggcccgagacttacttctgctttgctttc

SEQ ID NO: 1212 - DNA, 122 bp, Homo sapiens
  misc_feature (61)..(62): /note="This region represents a CpG dinucleotide"
  misc_feature (61)..(61): /note="Nucleotide may be methylated to form 5-methylcytosine"
gcccggggagcccccagacagtgcaagatgttagggtggtcggggtgctaaagccactcccgttgccaactgcggctccaggtcatgccccacccctcactgtgatgggataggctggggcc

SEQ ID NO: 1213 - DNA, 122 bp, Homo sapiens
  misc_feature (61)..(62): /note="This region represents a CpG dinucleotide"
  misc_feature (61)..(61): /note="Nucleotide may be methylated to form 5-methylcytosine"
tcctccgaggaaggcagggctatgagcggagccaaataatcacccgagggcaaggcgagccggagagagagcccggtcccaagacccgccgcgcatccgacgcctcctgaaggtctgggcgc

SEQ ID NO: 1214 - DNA, 122 bp, Homo sapiens
  misc_feature (61)..(62): /note="This region represents a CpG dinucleotide"
  misc_feature (61)..(61): /note="Nucleotide may be methylated to form 5-methylcytosine"
tctcttgcgcttggtgctttggttcttaggccttcagacctgagctgaaatctacaccaccggctctctgactatcaggctttggactatactttgggctttcctgggtctcttacctggca

SEQ ID NO: 1215 - DNA, 122 bp, Homo sapiens
  misc_feature (61)..(62): /note="This region represents a CpG dinucleotide"
  misc_feature (61)..(61): /note="Nucleotide may be methylated to form 5-methylcytosine"
aaaattagctgggcttggcagcgggagcctgtagtccctgctactcgggacgctgaggcacgagagtcgcttgaacctgggtggcggaagttacagtgagctgagatcgcgctactgcactc

SEQ ID NO: 1216 - DNA, 122 bp, Homo sapiens
  misc_feature (61)..(62): /note="This region represents a CpG dinucleotide"
  misc_feature (61)..(61): /note="Nucleotide may be methylated to form 5-methylcytosine"
caggctagcgggaggctctccgtgaggcacggagggtgactggggacaggcgggcggcgacgggcttgtcatggggatccgggctgcgagacggcactcgtagcatctggggactccgaggg

SEQ ID NO: 1217 - DNA, 122 bp, Homo sapiens
  misc_feature (61)..(62): /note="This region represents a CpG dinucleotide"
  misc_feature (61)..(61): /note="Nucleotide may be methylated to form 5-methylcytosine"
tcaacatgactaggctgtggtacccagttgtttggtcaaacatcaatctagacattgctgcgaaggtgtttttagatatgattaatatgcaaatcaatagattatcctccataatatgagtg

SEQ ID NO: 1218 - DNA, 122 bp, Homo sapiens
  misc_feature (61)..(62): /note="This region represents a CpG dinucleotide"
  misc_feature (61)..(61): /note="Nucleotide may be methylated to form 5-methylcytosine"
tccctaaattaccaagttacgcaaagaggagctgaccttgaacaacatctggcagtattacgtgttgtgcaagaacaggaaagacaaataccaagctctgtgcaacatttatggtggcatca

SEQ ID NO: 1219 - DNA, 122 bp, Homo sapiens
  misc_feature (61)..(62): /note="This region represents a CpG dinucleotide"
  misc_feature (61)..(61): /note="Nucleotide may be methylated to form 5-methylcytosine"
ccccaatgttggagggaaggcctagtgggaggtgtttgggtcatggggacagatccctcacgaaaggcttgaggctgtccttgtggtaatgagtgagttctcactctattagttcccttgag

SEQ ID NO: 1220 - DNA, 122 bp, Homo sapiens
  misc_feature (61)..(62): /note="This region represents a CpG dinucleotide"
  misc_feature (61)..(61): /note="Nucleotide may be methylated to form 5-methylcytosine"
ataataatacaacctgggcaacatggccaaacctcttctctacaaatacaaaaaattagccgggcgtggtagcgcactcctgtagtcccagctacttgggaggctgaagtgggaggattgct

SEQ ID NO: 1221 - DNA, 122 bp, Homo sapiens
  misc_feature (61)..(62): /note="This region represents a CpG dinucleotide"
  misc_feature (61)..(61): /note="Nucleotide may be methylated to form 5-methylcytosine"
aagggctggatggtaacagatcacagccaaagaaataacctgaaccaaggcagagacatccgggatggagagaagtggcagaaggcttatgagatatggaagttgaatggacaggatgtgtg

SEQ ID NO: 1222 - DNA, 122 bp, Homo sapiens
  misc_feature (61)..(62): /note="This region represents a CpG dinucleotide"
  misc_feature (61)..(61): /note="Nucleotide may be methylated to form 5-methylcytosine"
agctgctgctgaggacaacaaccctgccctggtcactccggaggctgaccagtctacacacggctgaagcttgaggaaacaagccctgttctaatcacacattggaagctgactagtctacg

SEQ ID NO: 1223 - DNA, 122 bp, Homo sapiens
  misc_feature (61)..(62): /note="This region represents a CpG dinucleotide"
  misc_feature (61)..(61): /note="Nucleotide may be methylated to form 5-methylcytosine"
gaccttctcctgctctcctttctcccccaaggtgtatcacagaaaccaggattcctcttccgcctgcccacctccagagcgattagaattcctcttccccaaagcaagccataaaacataga

SEQ ID NO: 1224 - DNA, 122 bp, Homo sapiens
  misc_feature (61)..(62): /note="This region represents a CpG dinucleotide"
  misc_feature (61)..(61): /note="Nucleotide may be methylated to form 5-methylcytosine"
catagtgagcccttgtctctacaaaaagaaataaaaataatagctgggtgtggtggcatgcgcatgtagtcccagctactcagaaggatgaggtgggaggatctcttgaggctgggaggcag

SEQ ID NO: 1225 - DNA, 122 bp, Homo sapiens
  misc_feature (61)..(62): /note="This region represents a CpG dinucleotide"
  misc_feature (61)..(61): /note="Nucleotide may be methylated to form 5-methylcytosine"
ttagaactccgatgattaaaagcttcgggtgtctatcggggcgcagcgccacactcgaagcgcccggtactgcggagcgcggctcgattgcagccgagaagcgcggaacccgcaagtggggg

SEQ ID NO: 1226 - DNA, 122 bp, Homo sapiens
  misc_feature (61)..(62): /note="This region represents a CpG dinucleotide"
  misc_feature (61)..(61): /note="Nucleotide may be methylated to form 5-methylcytosine"
gcccaagggtgtggccatttcacctccacagcagagttccaaacattctccaacccatggcgccatgaagagtcctaaatcacattcttccagaaagtaactgaagtcagattcttccccca

SEQ ID NO: 1227 - DNA, 122 bp, Homo sapiens
  misc_feature (61)..(62): /note="This region represents a CpG dinucleotide"
  misc_feature (61)..(61): /note="Nucleotide may be methylated to form 5-methylcytosine"
gagaggaagctggactcccgtgggggcctggggcgcagcgagggctgtggcgtcgggggccgggagaagaagagtaggggagcccaaagtagcccaggagtctttagcggaggaacctgggc

SEQ ID NO: 1228 - DNA, 122 bp, Homo sapiens
  misc_feature (61)..(62): /note="This region represents a CpG dinucleotide"
  misc_feature (61)..(61): /note="Nucleotide may be methylated to form 5-methylcytosine"
acaccttgcactgcttctgggtttactgttgcctcgttttaaagtgggactttctcttgacggaagtgtgttaagaattggaaaattccctatcagtagactagcaccatcttgacagcctt

SEQ ID NO: 1229 - DNA, 122 bp, Homo sapiens
  misc_feature (61)..(62): /note="This region represents a CpG dinucleotide"
  misc_feature (61)..(61): /note="Nucleotide may be methylated to form 5-methylcytosine"
cgcttccccgacgcgctgggttcccggagcgcagagcccagcgttagcgggtgggctccccgaggccccctgccctcgccgggctgctccagggtgtcgctcctctggctgctcccgaaggg

SEQ ID NO: 1230 - DNA, 122 bp, Homo sapiens
  misc_feature (61)..(62): /note="This region represents a CpG dinucleotide"
  misc_feature (61)..(61): /note="Nucleotide may be methylated to form 5-methylcytosine"
ggcgtcggcagcggctcaggttcaccaagaggtcggcggagggctctgcgggagggcgggcgtcggcggcgcaggggcgggggcgggggagggcggggccggaggctcaggggcggtgccgg

SEQ ID NO: 1231 - DNA, 122 bp, Homo sapiens
  misc_feature (61)..(62): /note="This region represents a CpG dinucleotide"
  misc_feature (61)..(61): /note="Nucleotide may be methylated to form 5-methylcytosine"
tacaggcatgtaccaccacacctggcctacatttgtatttttttacagacagggtttcaccgtgttgtacacgctggtcttgagctcctgagctcaagtgaatctcctgccttggcctcctg

SEQ ID NO: 1232 - DNA, 122 bp, Homo sapiens
  misc_feature (61)..(62): /note="This region represents a CpG dinucleotide"
  misc_feature (61)..(61): /note="Nucleotide may be methylated to form 5-methylcytosine"
aacttcaaacttttctcctgtggtttccttacctctctcagccttcacagaattgaagagcgttaagaccttgctctggattgggctttggcttaatggaatattgtggttgattagatctt

SEQ ID NO: 1233 - DNA, 122 bp, Homo sapiens
  misc_feature (61)..(62): /note="This region represents a CpG dinucleotide"
  misc_feature (61)..(61): /note="Nucleotide may be methylated to form 5-methylcytosine"
catagattaatccatttgtgaaggcagatcctttatgacccaaacacctcttaaaggtcccgcctctcaatactgtgacattagggattaaatttcaacatgagttttggaaaagacaaata

SEQ ID NO: 1234 - DNA, 122 bp, Homo sapiens
  misc_feature (61)..(62): /note="This region represents a CpG dinucleotide"
  misc_feature (61)..(61): /note="Nucleotide may be methylated to form 5-methylcytosine"
gacacagcagcagggtggatgcatcaggttataaatgaccctgtctcttttcttcgtgtgcgctcttgtggcaagactgctagcgagcagcaaccctttctgcagaaagtaaactagccttg

SEQ ID NO: 1235 - DNA, 122 bp, Homo sapiens
  misc_feature (61)..(62): /note="This region represents a CpG dinucleotide"
  misc_feature (61)..(61): /note="Nucleotide may be methylated to form 5-methylcytosine"
gccaaatgtgcgagctgggcagcccacccctttcagctgctggccggaagcggaagtgggcgtccgtcgcctcgccatctcccatagctgtcgcctgcagctgagaaagggttgctgtccca

SEQ ID NO: 1236 - DNA, 122 bp, Homo sapiens
  misc_feature (61)..(62): /note="This region represents a CpG dinucleotide"
  misc_feature (61)..(61): /note="Nucleotide may be methylated to form 5-methylcytosine"
gtgttgggtgtgttgttgtgaaaccaggaactgttacatttcttttgcttccacgagagacgcaatcgatgtaaagatgaagacatcacacagaagagaagagaactgagggaactacagag

SEQ ID NO: 1237 - DNA, 122 bp, Homo sapiens
  misc_feature (61)..(62): /note="This region represents a CpG dinucleotide"
  misc_feature (61)..(61): /note="Nucleotide may be methylated to form 5-methylcytosine"
cattttcttagtgatttgtgggaggtgtgtgtgtgtgtgtgtgttgtgtgttttccgagacggagtcgtgctttgtctcccatgctggagtgcattggtgcgatcttggctcactgcaacat

SEQ ID NO: 1238 - DNA, 122 bp, Homo sapiens
  misc_feature (61)..(62): /note="This region represents a CpG dinucleotide"
  misc_feature (61)..(61): /note="Nucleotide may be methylated to form 5-methylcytosine"
tttaaaaaatcacatttcttggacacagatttctgacctttagccggcggtctgggtctccgctgcatagagaatttacagatactttgaatgatttccaggctgggcttaagttattcatc

SEQ ID NO: 1239 - DNA, 122 bp, Homo sapiens
  misc_feature (61)..(62): /note="This region represents a CpG dinucleotide"
  misc_feature (61)..(61): /note="Nucleotide may be methylated to form 5-methylcytosine"
cgagctggtgaggtgagagggatactgcgagagggctaggggcggccagtccggggctgccggccaaggctaggcgctgccagcccgattctcctctgctctccacccccgcctcacccagt

SEQ ID NO: 1240 - DNA, 122 bp, Homo sapiens
  misc_feature (61)..(62): /note="This region represents a CpG dinucleotide"
  misc_feature (61)..(61): /note="Nucleotide may be methylated to form 5-methylcytosine"
ggaagctaatgatgtgactctcagcctgaggctgaaaggccgggacctgggaactgctggcgtaagtcccagagtccaaaggctggaggcctccagttctgatgtccaaggcagcgaaaaag

SEQ ID NO: 1241 - DNA, 122 bp, Homo sapiens
  misc_feature (61)..(62): /note="This region represents a CpG dinucleotide"
  misc_feature (61)..(61): /note="Nucleotide may be methylated to form 5-methylcytosine"
cggtggattcgccgtgcgcagccggaagatggcgcagacgcacaaagcacaccgatgctgcgccatgatagggccggcgccgcagtgtcttccgggaaacatagtctttaggcgtaaaggca

SEQ ID NO: 1242 - DNA, 122 bp, Homo sapiens
  misc_feature (61)..(62): /note="This region represents a CpG dinucleotide"
  misc_feature (61)..(61): /note="Nucleotide may be methylated to form 5-methylcytosine"
gagtgcccccagatggcggaggtctgcaggaggctaggttctggtggcgcagatcccggacgcctggatccgggaggcggggacccgggctgcctgggtcttggacactgagggctgggatg

SEQ ID NO: 1243 - DNA, 122 bp, Homo sapiens
  misc_feature (61)..(62): /note="This region represents a CpG dinucleotide"
  misc_feature (61)..(61): /note="Nucleotide may be methylated to form 5-methylcytosine"
cccctcaaggctccacctccaaataccatcaacatatgaactttaggattgagtttccaacgtatggaatttgggggacacagtcaaaccatagcactcggtatctgaccaccctcaacatc

SEQ ID NO: 1244 - DNA, 122 bp, Homo sapiens
  misc_feature (61)..(62): /note="This region represents a CpG dinucleotide"
  misc_feature (61)..(61): /note="Nucleotide may be methylated to form 5-methylcytosine"
gctgctgcagcggcaggtgctgggtcgggggcgctgggggctgctggtagccggggcccccgcccgggccgccgtctgcgccgcccgagccgctgtgctgcgcgtactcctcgaagggaggg

SEQ ID NO: 1245 - DNA, 122 bp, Homo sapiens
  misc_feature (61)..(62): /note="This region represents a CpG dinucleotide"
  misc_feature (61)..(61): /note="Nucleotide may be methylated to form 5-methylcytosine"
acgcgtattatttatctccataacaatagctaatatcttcaggggccaggcttcacattacgtgccttatacgcactattatacagtacacgtctctgaggtagatactattattatcacca

SEQ ID NO: 1246 - DNA, 122 bp, Homo sapiens
  misc_feature (61)..(62): /note="This region represents a CpG dinucleotide"
  misc_feature (61)..(61): /note="Nucleotide may be methylated to form 5-methylcytosine"
ctgaacaacataatccacaaacccgatgtaatagacatctgtggaatgtggtatccaaaacgtaaggacacgatcttttcaaccgaggtagggtttcagaaaactgtccacatatgagctta

SEQ ID NO: 1247 - DNA, 122 bp, Homo sapiens
  misc_feature (61)..(62): /note="This region represents a CpG dinucleotide"
  misc_feature (61)..(61): /note="Nucleotide may be methylated to form 5-methylcytosine"
ataaagtcatctcccctggaaatacttgcctcagtgattggcattctgtgcaatgagtaacgggacctaggctgaacctctggcatttcagtaacagattttggttccctcatcaggaagac

SEQ ID NO: 1248 - DNA, 122 bp, Homo sapiens
  misc_feature (61)..(62): /note="This region represents a CpG dinucleotide"
  misc_feature (61)..(61): /note="Nucleotide may be methylated to form 5-methylcytosine"
ctaaaattgcgtcatttagaacccaattgggtccagatgttatgggcatcgacgagttaccgtctcggaaactctcaatcacgcaagcgaaaggagaggaggcggctaattaaatattgagc

SEQ ID NO: 1249 - DNA, 122 bp, Homo sapiens
  misc_feature (61)..(62): /note="This region represents a CpG dinucleotide"
  misc_feature (61)..(61): /note="Nucleotide may be methylated to form 5-methylcytosine"
ccgactttggcagcaagcatacaccctgattactcaatgccagggacagagagaggccagcgctaggagcaatgaggactggcttggccactcactcgcatgtgaccccaggcaagtcactt

SEQ ID NO: 1250 - DNA, 122 bp, Homo sapiens
  misc_feature (61)..(62): /note="This region represents a CpG dinucleotide"
  misc_feature (61)..(61): /note="Nucleotide may be methylated to form 5-methylcytosine"
aggcaaatactgcgtgatcttacttatacgtgtaagagttaaagaaagagaaaagaaacacgaaaaggggctcaacagtcaaagacgggtttattttggagaataaacctgagaggggcttc

SEQ ID NO: 1251 - DNA, 122 bp, Homo sapiens
  misc_feature (61)..(62): /note="This region represents a CpG dinucleotide"
  misc_feature (61)..(61): /note="Nucleotide may be methylated to form 5-methylcytosine"
gaatttaaattaacaagaaatgtgtgcagatcaggctagacagaactgtgttgctggacacggagacattacagaggataagctactgggtaatgacccttattcagacctggaacgtcaaa

SEQ ID NO: 1252 - DNA, 122 bp, Homo sapiens
  misc_feature (61)..(62): /note="This region represents a CpG dinucleotide"
  misc_feature (61)..(61): /note="Nucleotide may be methylated to form 5-methylcytosine"
acattaaggtggataccaaggataaaacatgttctctgtttctgaaaatagagaaaagaccgggaagaagtttaaagttggctttcagcccaccaatagagataacactatataacaccatt

SEQ ID NO: 1253 - DNA, 122 bp, Homo sapiens
  misc_feature (61)..(62): /note="This region represents a CpG dinucleotide"
  misc_feature (61)..(61): /note="Nucleotide may be methylated to form 5-methylcytosine"
tgagccactgtgccaggccaagaatatttttctatgcctttttgtcagaagagacaatgccgggaagtgctctggccagaagcagaagtgaaagcctgtgtctttggaatgcactttggtac

SEQ ID NO: 1254 - DNA, 122 bp, Homo sapiens
  misc_feature (61)..(62): /note="This region represents a CpG dinucleotide"
  misc_feature (61)..(61): /note="Nucleotide may be methylated to form 5-methylcytosine"
gtggtcctcccacctcagccttccaagtagctgggatttataggcacaggtgtgtgccaccgtgcctggctgtggagggttcttcagaggcagagccctgggttggtttgaatccttcatgc

SEQ ID NO: 1255 - DNA, 122 bp, Homo sapiens
  misc_feature (61)..(62): /note="This region represents a CpG dinucleotide"
  misc_feature (61)..(61): /note="Nucleotide may be methylated to form 5-methylcytosine"
aaaagtcactcagcttgttactggaaaggggtcctgatccaaaccccaggttggatctcacgcaagaaagaattcgaggataatccagagtaaagtgaaagcaagtttattaagaaagtaaa

SEQ ID NO: 1256 - DNA, 122 bp, Homo sapiens
  misc_feature (61)..(62): /note="This region represents a CpG dinucleotide"
  misc_feature (61)..(61): /note="Nucleotide may be methylated to form 5-methylcytosine"
gcggcgtccactgcaaggatgcactgtctggctccctctggaggcgggagcacgaaggagcgaccacggagcccttgagcctgtggatggtggcctcggcggccggcaggccatgctggagt

SEQ ID NO: 1257 - DNA, 122 bp, Homo sapiens
  misc_feature (61)..(62): /note="This region represents a CpG dinucleotide"
  misc_feature (61)..(61): /note="Nucleotide may be methylated to form 5-methylcytosine"
tttaccaacatgtggctgtgttggagtctctctgagcctactctggatccataggttacccgatttgcaaatcatgatttgctcatttaaactgttaaatttaatttttctaaagttttctt

SEQ ID NO: 1258 - DNA, 122 bp, Homo sapiens
  misc_feature (61)..(62): /note="This region represents a CpG dinucleotide"
  misc_feature (61)..(61): /note="Nucleotide may be methylated to form 5-methylcytosine"
cccccgccggccgccggccgcgctccccgccttcattctgtgatctgcggatttgccagtcgccaacctccgcgcccagagtcaccatcgcgcagggttgggcaaaccatggagctcggggc

SEQ ID NO: 1259 - DNA, 122 bp, Homo sapiens
  misc_feature (61)..(62): /note="This region represents a CpG dinucleotide"
  misc_feature (61)..(61): /note="Nucleotide may be methylated to form 5-methylcytosine"
ctgggctctgacacagaatctttttttttttgagacagggtctcactctgtcacccaggccggagtgcactggcacaatcagggctgactgcagcctcgacttcccaagctcaagcaattct

SEQ ID NO: 1260 - DNA, 122 bp, Homo sapiens
  misc_feature (61)..(62): /note="This region represents a CpG dinucleotide"
  misc_feature (61)..(61): /note="Nucleotide may be methylated to form 5-methylcytosine"
atttttacagctgttgggctgtacagtataaactaccgtacttctcagggccagcgagatcgtggttcacgttaagagttgagtatacgtaacgactcttgctaattgggagtaaaagtaac

SEQ ID NO: 1261 - DNA, 122 bp, Homo sapiens
  misc_feature (61)..(62): /note="This region represents a CpG dinucleotide"
  misc_feature (61)..(61): /note="Nucleotide may be methylated to form 5-methylcytosine"
atcaaagcagaattgaaccgcccccttggtagacctgagaaatgtagacagacctgttggcgagccatgaaaatgttgcagagagagtcatcagaggcatctgtagctaaacatgctatgca

SEQ ID NO: 1262 - DNA, 122 bp, Homo sapiens
  misc_feature (61)..(62): /note="This region represents a CpG dinucleotide"
  misc_feature (61)..(61): /note="Nucleotide may be methylated to form 5-methylcytosine"
gccaccacatggtccaacatgtgagctgaaaaactgcagcagcaaactgggatggatctacgagtttgccaccgaagacagccagtgttacaaggaaggccatgtgatcctggaacgtgctc

SEQ ID NO: 1263 - DNA, 122 bp, Homo sapiens
  misc_feature (61)..(62): /note="This region represents a CpG dinucleotide"
  misc_feature (61)..(61): /note="Nucleotide may be methylated to form 5-methylcytosine"
acctcatgatccgcccacctcgccctcccaaagtgctgggatttcaggcgtgagccaccacgcccagtgtgttattgctttaattgaggaggaaaaagaataaacacaatttaacatttcaa

SEQ ID NO: 1264 - DNA, 122 bp, Homo sapiens
  misc_feature (61)..(62): /note="This region represents a CpG dinucleotide"
  misc_feature (61)..(61): /note="Nucleotide may be methylated to form 5-methylcytosine"
attttatattcttatatattatgtacacacaaaatactcttctaaacacagagaatactccgatatcacctagggtgtgtgtgcgtgtgcgtgtgtgtgcgtgtgtgtgtggttcttttctg

SEQ ID NO: 1265 - DNA, 122 bp, Homo sapiens
  misc_feature (61)..(62): /note="This region represents a CpG dinucleotide"
  misc_feature (61)..(61): /note="Nucleotide may be methylated to form 5-methylcytosine"
gtggagatgtatgcagcatacagcagccgctagttttcctcagcttcacatcctgggtgtcggggggctgccaccttgatcatgggagtgcccagtgtagtcagtgccatacctatcagggc

SEQ ID NO: 1266 - DNA, 122 bp, Homo sapiens
  misc_feature (61)..(62): /note="This region represents a CpG dinucleotide"
  misc_feature (61)..(61): /note="Nucleotide may be methylated to form 5-methylcytosine"
tacccatgtcctttaagattacagtcctggccctgtgataagccagatgcagatccacatcgtactcattcactgaaagagaggcgttggctttgtctgatgctagctttttcttaggcgca

SEQ ID NO: 1267 - DNA, 122 bp, Homo sapiens
  misc_feature (61)..(62): /note="This region represents a CpG dinucleotide"
  misc_feature (61)..(61): /note="Nucleotide may be methylated to form 5-methylcytosine"
atgtgtttgatctcttcatgccaacccaatcccttgataaaagtattgcaaactaaaatacgtaggattgagaacattattcagtgatgtttcatgatcggccattacacagtggaatgcat

SEQ ID NO: 1268 - DNA, 122 bp, Homo sapiens
  misc_feature (61)..(62): /note="This region represents a CpG dinucleotide"
  misc_feature (61)..(61): /note="Nucleotide may be methylated to form 5-methylcytosine"
ttctaaggtgtgtcaccatctcttgacatttgacctgtgaaagcattagttccctgacagcgtatgactgtactctagaaaggtgttgtctgaatttttacttcccaatcagtattctcact

SEQ ID NO: 1269 - DNA, 122 bp, Homo sapiens
  misc_feature (61)..(62): /note="This region represents a CpG dinucleotide"
  misc_feature (61)..(61): /note="Nucleotide may be methylated to form 5-methylcytosine"
ggtcttcccacctgagcctcctgggtagctgggactacctgcatgtgccaccacatctggcgtgtgtgtgtgtgtgtgtgtgtgtgtgtgtgtgtgtgtgtgtgtgtacggggtcttgctat

SEQ ID NO: 1270 - DNA, 122 bp, Homo sapiens
  misc_feature (61)..(62): /note="This region represents a CpG dinucleotide"
  misc_feature (61)..(61): /note="Nucleotide may be methylated to form 5-methylcytosine"
agctgggtcggctctcccttccgcccgccgctccctcccctccgccagctctcctcctcccgggcgcctgcggctgccctgccaaaacttctgcagttcccatgcccttcgcggcgactcca

SEQ ID NO: 1271 - DNA, 122 bp, Homo sapiens
  misc_feature (61)..(62): /note="This region represents a CpG dinucleotide"
  misc_feature (61)..(61): /note="Nucleotide may be methylated to form 5-methylcytosine"
cgggtccagagctccgattggccagagtcggagtaaacatccggcgggacggggcggggccggaagtggaagtggaagtagaaggcggtggctgaggcggttccggaggttctagtgtcgga

SEQ ID NO: 1272 - DNA, 122 bp, Homo sapiens
  misc_feature (61)..(62): /note="This region represents a CpG dinucleotide"
  misc_feature (61)..(61): /note="Nucleotide may be methylated to form 5-methylcytosine"
gccgggagcctgacgtcaccacgccctgcctgtcaatctgcagcgcgcgccgctcgcagccgccttttctgccaccaactgtatctctcactcgcggagccggcacagcgacaggcgccccg

SEQ ID NO: 1273 - DNA, 122 bp, Homo sapiens
  misc_feature (61)..(62): /note="This region represents a CpG dinucleotide"
  misc_feature (61)..(61): /note="Nucleotide may be methylated to form 5-methylcytosine"
gctattataacaaaaatatatcttcaacaacaaacatttatttctcacaattctgcaagccgagaagtccaaaatcaaggtattggcatatctggcgtctggagacagcttcgttttcactg

SEQ ID NO: 1274 - DNA, 122 bp, Homo sapiens
  misc_feature (61)..(62): /note="This region represents a CpG dinucleotide"
  misc_feature (61)..(61): /note="Nucleotide may be methylated to form 5-methylcytosine"
acataacatttgccattttaaccattttaaagtataaaattcagtggcattaagtgctttcgcagtgttgtgcaaccatcaccactatcaaggtccagaactttttgatgactcaaatggaa

SEQ ID NO: 1275 - DNA, 122 bp, Homo sapiens
  misc_feature (61)..(62): /note="This region represents a CpG dinucleotide"
  misc_feature (61)..(61): /note="Nucleotide may be methylated to form 5-methylcytosine"
catccccaatagtggcaacatcccctaccagacccacactgccatcagcctctccaccttcgtctgaggagatagactctgtgctgcctcaggcaatagtggtggcttcccctgaggcagtt

SEQ ID NO: 1276 - DNA, 122 bp, Homo sapiens
  misc_feature (61)..(62): /note="This region represents a CpG dinucleotide"
  misc_feature (61)..(61): /note="Nucleotide may be methylated to form 5-methylcytosine"
gtcagggctctgggtgaggctggaagctgtggctccccctcccccgtgtgtgtggacaggcgctggggggtctctgctcactcactggaggccacggtcagcgctcagcccctcccctgtgt

SEQ ID NO: 1277 - DNA, 122 bp, Homo sapiens
  misc_feature (61)..(62): /note="This region represents a CpG dinucleotide"
  misc_feature (61)..(61): /note="Nucleotide may be methylated to form 5-methylcytosine"
aaaacagaacttagctgtatgctgttcaaaagacacacttcaaacaaaatgacaatgatacgttgagagtaaaagggtagcaaaaaatatatgtaatgcaaacattaatcagtaaaaactag

SEQ ID NO: 1278 - DNA, 122 bp, Homo sapiens
  misc_feature (61)..(62): /note="This region represents a CpG dinucleotide"
  misc_feature (61)..(61): /note="Nucleotide may be methylated to form 5-methylcytosine"
tttttttttttttgtatttttagtagacacagggtgtcaccgcgtaaaccaggatagtctcgatctcctgacctcgtgatccgcccgtctcggcctcccaaagtgctgggactgcaggcgtg

SEQ ID NO: 1279 - DNA, 122 bp, Homo sapiens
  misc_feature (61)..(62): /note="This region represents a CpG dinucleotide"
  misc_feature (61)..(61): /note="Nucleotide may be methylated to form 5-methylcytosine"
gagagagggagcaagagagctgccgggttcttttaaacaaccaggtctcatgtgaactaacgagcaagaactcactcatgaccacagggagggcaccaagccatggtgaagggtccgccccc

SEQ ID NO: 1280 - DNA, 122 bp, Homo sapiens
  misc_feature (61)..(62): /note="This region represents a CpG dinucleotide"
  misc_feature (61)..(61): /note="Nucleotide may be methylated to form 5-methylcytosine"
agtcttctttccaaataaggaaaggaatgtgagctggtactgataagcctggtactgtggcgtgtccaggcatgtaacaaaggcagaaacgaaaaaaagagaaaaaggaaaaaaggttgtgg

SEQ ID NO: 1281 - DNA, 122 bp, Homo sapiens
  misc_feature (61)..(62): /note="This region represents a CpG dinucleotide"
  misc_feature (61)..(61): /note="Nucleotide may be methylated to form 5-methylcytosine"
cttccctgatacccaccgggcacgcgagttcacgccagcgacagtggaaagccctcccctcgcagcgcgctccgccactagccgcaccccgccgagctctgacctccgaagagggtccctgt

SEQ ID NO: 1282 - DNA, 122 bp, Homo sapiens
  misc_feature (61)..(62): /note="This region represents a CpG dinucleotide"
  misc_feature (61)..(61): /note="Nucleotide may be methylated to form 5-methylcytosine"
tgtttaaagaattcgtcctcttgccctcaatgccccatcggctccctaattagcagcgcgcggcgcgattacacattctctgcagctcgctgggtccggcccccgcaatgagtgtttgtgga

SEQ ID NO: 1283 - DNA, 122 bp, Homo sapiens
  misc_feature (61)..(62): /note="This region represents a CpG dinucleotide"
  misc_feature (61)..(61): /note="Nucleotide may be methylated to form 5-methylcytosine"
tcggcttctaatcgggaagtaatctcagtgacgctggcggtgcagagaaccgagtctggacgcacacacacaaacacaccgcgggcctccgcagccttgcagacattctctccaacgctgac

SEQ ID NO: 1284 - DNA, 122 bp, Homo sapiens
  misc_feature (61)..(62): /note="This region represents a CpG dinucleotide"
  misc_feature (61)..(61): /note="Nucleotide may be methylated to form 5-methylcytosine"
gcgcgaagggcagaggccgaggcccaccgggaggcagaggcccaggcctgggagcaagcccggctgcgggaggcagtggaggctgctggccaggagctggagtctgcgtcccaggaacggga

SEQ ID NO: 1285 - DNA, 122 bp, Homo sapiens
  misc_feature (61)..(62): /note="This region represents a CpG dinucleotide"
  misc_feature (61)..(61): /note="Nucleotide may be methylated to form 5-methylcytosine"
acctgcagcagcggggagccgccgagctcctccccgcccgcccccacaccccacccccaccgctgcactaaccccggctcagctggctccgcgcacttgctcggaggagccggggccgagcg

SEQ ID NO: 1286 - DNA, 122 bp, Homo sapiens
  misc_feature (61)..(62): /note="This region represents a CpG dinucleotide"
  misc_feature (61)..(61): /note="Nucleotide may be methylated to form 5-methylcytosine"
agctgggactactggctcatgccaccacgcctggctaatttttcaatttttttgttgagacggagcctcactttgttgcccaggttggtctcaaactcctgggcccaagctatcctcctgtg

SEQ ID NO: 1287 - DNA, 122 bp, Homo sapiens
  misc_feature (61)..(62): /note="This region represents a CpG dinucleotide"
  misc_feature (61)..(61): /note="Nucleotide may be methylated to form 5-methylcytosine"
ccaggaagaatccagaatagttcagacaagcttcaggtccgccagaaccggggaaaacaacgtgtagggtttgttttaaagggcttttaaatggggtttgggagatccaggtagattagaat

SEQ ID NO: 1288 - DNA, 122 bp, Homo sapiens
  misc_feature (61)..(62): /note="This region represents a CpG dinucleotide"
  misc_feature (61)..(61): /note="Nucleotide may be methylated to form 5-methylcytosine"
ggctgcccaagaaatgaacctgcatgaactgcctgggtgactgagcctgctgtgctgctacgcacagtcccattctgacagtcctgtatccgctccacacccaaggtgcttcatgacaagat

SEQ ID NO: 1289 - DNA, 122 bp, Homo sapiens
  misc_feature (61)..(62): /note="This region represents a CpG dinucleotide"
  misc_feature (61)..(61): /note="Nucleotide may be methylated to form 5-methylcytosine"
actcagggaaatagctccccacaaggcattgcattagggagaaactatggtgaggaacagcgatgagcaggacatgaagagtgatggtcctaagccagatatgatgtcatgagggtgaactc

SEQ ID NO: 1290 - DNA, 122 bp, Homo sapiens
  misc_feature (61)..(62): /note="This region represents a CpG dinucleotide"
  misc_feature (61)..(61): /note="Nucleotide may be methylated to form 5-methylcytosine"
ggcgtgtgcctgcaggtgtgtcctcacgggtgtgtcctcatgggcatgtgcctgcaggtgcgtcctcatgggcgtgtgcctgcaggtgcgtcctcatgggagtgtcctcatgggtgtgtggc

SEQ ID NO: 1291 - DNA, 122 bp, Homo sapiens
  misc_feature (61)..(62): /note="This region represents a CpG dinucleotide"
  misc_feature (61)..(61): /note="Nucleotide may be methylated to form 5-methylcytosine"
aggcagggttggctctaacgaatttgaatgaggagcctcagcacttttcggcgccattttcgagtgatacctgatctcatcaatctagcggaagagacaggataacctatccaagagtatag

SEQ ID NO: 1292 - DNA, 122 bp, Homo sapiens
  misc_feature (61)..(62): /note="This region represents a CpG dinucleotide"
  misc_feature (61)..(61): /note="Nucleotide may be methylated to form 5-methylcytosine"
attgaaccctcccatctcacacacacacactccccaattcacaggatcatccctaaggagcgtccctaagtggaagggcgcactgtctgtgtaaacaatcaattaattgcccattcaaacag

SEQ ID NO: 1293 - DNA, 122 bp, Homo sapiens
  misc_feature (61)..(62): /note="This region represents a CpG dinucleotide"
  misc_feature (61)..(61): /note="Nucleotide may be methylated to form 5-methylcytosine"
gccccgcgcgcgcggatggcggggcttggcggcgctgtggatgctgttggcgcaggtggccgagcaggtgagtcccgggcgctcccaccagcgcggaaaccgcgggtccggacagctggagg

SEQ ID NO: 1294 - DNA, 122 bp, Homo sapiens
  misc_feature (61)..(62): /note="This region represents a CpG dinucleotide"
  misc_feature (61)..(61): /note="Nucleotide may be methylated to form 5-methylcytosine"
gaaaaccaagatgccacccatggtcaagggcagggacaagagaatgtgcgtcagaaagaacgctctgaaagaacattctgtcagggatagcacctgacacacccgcagtgttaccgatgcct

SEQ ID NO: 1295 - DNA, 122 bp, Homo sapiens
  misc_feature (61)..(62): /note="This region represents a CpG dinucleotide"
  misc_feature (61)..(61): /note="Nucleotide may be methylated to form 5-methylcytosine"
aatgcggcataaaagaggtgggcgtcgtacgtcgttacgcagcgcggttgctgggcacctcgactatcacctgaccgtagtaatatctcccgctacgcgcgttgtgaccaatgctgcataca

SEQ ID NO: 1296 - DNA, 122 bp, Homo sapiens
  misc_feature (61)..(62): /note="This region represents a CpG dinucleotide"
  misc_feature (61)..(61): /note="Nucleotide may be methylated to form 5-methylcytosine"
ctaattacctcttaaaggttccacctctcaacaccattgcattgggatttaagttttcaacgcatgaacactttaagattcttaaagtggtttcttgagatagaatgtactgctatggcttg

SEQ ID NO: 1297 - DNA, 122 bp, Homo sapiens
  misc_feature (61)..(62): /note="This region represents a CpG dinucleotide"
  misc_feature (61)..(61): /note="Nucleotide may be methylated to form 5-methylcytosine"
gctgcagccacccaatcttgtgatgtgtgtccttcaatggacagggagaccatcacactccgcttgggtttttttcttcattgtgatgcaatccagagagttcttcctgccaggaagggtaa

SEQ ID NO: 1298 - DNA, 122 bp, Homo sapiens
  misc_feature (61)..(62): /note="This region represents a CpG dinucleotide"
  misc_feature (61)..(61): /note="Nucleotide may be methylated to form 5-methylcytosine"
acccgggaggtggaggttgcagtgagtcgacatcgcaccactgcactccagcctgggtgacggtgagactgtctccaagaaaaaagaaagaaaagcatgtagttaacctgcaacgacatcaa

SEQ ID NO: 1299 - DNA, 122 bp, Homo sapiens
  misc_feature (61)..(62): /note="This region represents a CpG dinucleotide"
  misc_feature (61)..(61): /note="Nucleotide may be methylated to form 5-methylcytosine"
tgaacatttccttctatccagctggctgctccaataagaaactattacccttgttccaaacgcacaagctcatccctgtgtgggcaaatagatgctacttggacaattccagttttattttt

SEQ ID NO: 1300 - DNA, 122 bp, Homo sapiens
  misc_feature (61)..(62): /note="This region represents a CpG dinucleotide"
  misc_feature (61)..(61): /note="Nucleotide may be methylated to form 5-methylcytosine"
ctggaatttctaagcaagcacataattagataagcaagcacagtgcatgggagtgcctggcgggaaagggaggaaaacaaagagttttaaagtacatttcaaggctatattttgagtttaaa

SEQ ID NO: 1301 - DNA, 122 bp, Homo sapiens
  misc_feature (61)..(62): /note="This region represents a CpG dinucleotide"
  misc_feature (61)..(61): /note="Nucleotide may be methylated to form 5-methylcytosine"
gtccaattaaacctctttttcttcccagtctgaggtatgtctttatcagcagtgtgaaaacggactaatacagtgcacaaagagggaaaatatatttgtaaggtatttggccaaaaaagcat

SEQ ID NO: 1302 - DNA, 122 bp, Homo sapiens
  misc_feature (61)..(62): /note="This region represents a CpG dinucleotide"
  misc_feature (61)..(61): /note="Nucleotide may be methylated to form 5-methylcytosine"
gcataaggagcaaaataaggcagatgcagtggctcagtggctcctggtggctgcgaggagcgtgggcaggacagccccaggagggcacctggagagcagggccggctggggcaaggtgtgtc

SEQ ID NO: 1303 - DNA, 122 bp, Homo sapiens
  misc_feature (61)..(62): /note="This region represents a CpG dinucleotide"
  misc_feature (61)..(61): /note="Nucleotide may be methylated to form 5-methylcytosine"
gccctctgcgtccagggcgtgtactgagcccaggctagctgagcgaggctgcagcccctgcgatggcccgggaagaggcaagtgccgcggggccagagcgaggagggaccagcagggcggcc

SEQ ID NO: 1304 - DNA, 122 bp, Homo sapiens
  misc_feature (61)..(62): /note="This region represents a CpG dinucleotide"
  misc_feature (61)..(61): /note="Nucleotide may be methylated to form 5-methylcytosine"
gtttggaagtccaagatcaaggtgctgacagattctgtgtctggtgaaggcccagttcctcgttcataaatgattgcttttttgcagtgtcctaatgtgaaggaaggggcaggagagctctc

SEQ ID NO: 1305 - DNA, 122 bp, Homo sapiens
  misc_feature (61)..(62): /note="This region represents a CpG dinucleotide"
  misc_feature (61)..(61): /note="Nucleotide may be methylated to form 5-methylcytosine"
cttgaaaaggacaaagtcagaggactcacactcccgaattcaaaacttattacaaaactacgtaatggcatcagactaaacatatcaatggaatagaactgagtccagaaataaagccttaa

SEQ ID NO: 1306 - DNA, 122 bp, Homo sapiens
  misc_feature (61)..(62): /note="This region represents a CpG dinucleotide"
  misc_feature (61)..(61): /note="Nucleotide may be methylated to form 5-methylcytosine"
acttgctggtctaatttaggaacaattgggccgaaaggtatcagcgagagcaacagaccccggtgttgtgccgcacagggagccgcatccgcagacgcccctcgctgcccctgggctcgggc

SEQ ID NO: 1307 - DNA, 122 bp, Homo sapiens
  misc_feature (61)..(62): /note="This region represents a CpG dinucleotide"
  misc_feature (61)..(61): /note="Nucleotide may be methylated to form 5-methylcytosine"
ctcccgcgccaggactttgttgaatgaatgactgaactgagcgggcgccgcggggcggggcgtcccgaagcggacctcaaggcgggcggaggcgagagctccgccccggaaggcgggggcgg

SEQ ID NO: 1308 - DNA, 122 bp, Homo sapiens
  misc_feature (61)..(62): /note="This region represents a CpG dinucleotide"
  misc_feature (61)..(61): /note="Nucleotide may be methylated to form 5-methylcytosine"
gctggtgaagaaggacaaggtggtggtcttcctcaaggggacgccggagcagccccagtgcggcttcagcaacgccgtggtgcagatcctgcggctgcacggcgtccgcgattacgcggcct

SEQ ID NO: 1309 - DNA, 122 bp, Homo sapiens
  misc_feature (61)..(62): /note="This region represents a CpG dinucleotide"
  misc_feature (61)..(61): /note="Nucleotide may be methylated to form 5-methylcytosine"
tgctccccgaatcctcggcccctcccccagactctcaactcggaaatctctcgccgtcgccgccgcgcccctctcgcagcgcatcgcggcttccaactctcaaaccgttcccccccaactct

SEQ ID NO: 1310 - DNA, 122 bp, Homo sapiens
  misc_feature (61)..(62): /note="This region represents a CpG dinucleotide"
  misc_feature (61)..(61): /note="Nucleotide may be methylated to form 5-methylcytosine"
gggttgcagggagccgagatcacgtcactgcactctaccctgggtgacagagcgagatgccgtgtcaaaaaaaataaattaaatcaaataaaaaatttaaaaatgtatatatataaaataaa

SEQ ID NO: 1311 - DNA, 122 bp, Homo sapiens
  misc_feature (61)..(62): /note="This region represents a CpG dinucleotide"
  misc_feature (61)..(61): /note="Nucleotide may be methylated to form 5-methylcytosine"
tttgaaaactcttgctgagcactgcatgtggtaactcattaaactgtcagaaacatgcaacgcagtaaggaaaatcaggttcagagaggttaagtaacttccctgaggttagacactagtaa

SEQ ID NO: 1312 - DNA, 122 bp, Homo sapiens
  misc_feature (61)..(62): /note="This region represents a CpG dinucleotide"
  misc_feature (61)..(61): /note="Nucleotide may be methylated to form 5-methylcytosine"
gagaagttgatgttgcagcttgagtccaaaagcagtctggaggcagaatcccctcttcctcggggcacgtcagtctttttctcttaaggttttcagcttactggatgagtcccacccacact

SEQ ID NO: 1313 - DNA, 122 bp, Homo sapiens
  misc_feature (61)..(62): /note="This region represents a CpG dinucleotide"
  misc_feature (61)..(61): /note="Nucleotide may be methylated to form 5-methylcytosine"
tgcactcatgttaactacagcagtagtccccaacctttttagcaccagggactggtttcacggaagacaatttttcaatgggtcaaggatggtttcaggatgaaactgttccaccttagatc

SEQ ID NO: 1314 - DNA, 122 bp, Homo sapiens
  misc_feature (61)..(62): /note="This region represents a CpG dinucleotide"
  misc_feature (61)..(61): /note="Nucleotide may be methylated to form 5-methylcytosine"
ctaaggacaccacaccatgcaagcctggtaccgcccacagccctcccaccgccctcccaccgctgtgcttctgtgtctgtgctgcccctgacatcccattctgtacagcaaacactgactca

SEQ ID NO: 1315 - DNA, 122 bp, Homo sapiens
  misc_feature (61)..(62): /note="This region represents a CpG dinucleotide"
  misc_feature (61)..(61): /note="Nucleotide may be methylated to form 5-methylcytosine"
ttctactgctctcttagtccctctctctgtctcctgatccctttggcccacacgatcacacgagggtttggagtaagacacctgcatctcggagaagcgcattttcccagagctggagctgg

SEQ ID NO: 1316 - DNA, 122 bp, Homo sapiens
  misc_feature (61)..(62): /note="This region represents a CpG dinucleotide"
  misc_feature (61)..(61): /note="Nucleotide may be methylated to form 5-methylcytosine"
ttcctttgtttggttcggagactgcttgatccatggctgcttggcaggcttcttctttagcgttcattcttgtggccatttattctctgatattaaactacaggataattttaatctcaact

SEQ ID NO: 1317 - DNA, 122 bp, Homo sapiens
  misc_feature (61)..(62): /note="This region represents a CpG dinucleotide"
  misc_feature (61)..(61): /note="Nucleotide may be methylated to form 5-methylcytosine"
cgcgccggccccgcctcccctctgccctccctcgacgggcccagccccgccccgcccggccggttccctccgcggggccccggccactccttgtgcaagcgcaggcctccaaagggtttggg

SEQ ID NO: 1318 - DNA, 122 bp, Homo sapiens
  misc_feature (61)..(62): /note="This region represents a CpG dinucleotide"
  misc_feature (61)..(61): /note="Nucleotide may be methylated to form 5-methylcytosine"
gggcgctgagcactcacctaggagcgggaggcgtttcattggcggtggccgcagtggtggcggtggcggagagcgcggcggagtgagtgcggctgtggacccgggaccgggcgccgctgggc

SEQ ID NO: 1319 - DNA, 122 bp, Homo sapiens
  misc_feature (61)..(62): /note="This region represents a CpG dinucleotide"
  misc_feature (61)..(61): /note="Nucleotide may be methylated to form 5-methylcytosine"
gaaaggggcgggtgcggtggctcacgcctgtaacccagcactttgggaggccgaggcaagcggattgcttgagtcccggaagctgttcaagaccagcctggctaaaatgacgaaactccggg

SEQ ID NO: 1320 - DNA, 122 bp, Homo sapiens
  misc_feature (61)..(62): /note="This region represents a CpG dinucleotide"
  misc_feature (61)..(61): /note="Nucleotide may be methylated to form 5-methylcytosine"
gtattatctttcattgtaaatgagtaaaatgacatcagtctcctgtgaggatggggcatgcgagtcacccagagtctcttaaatcctggactcactggacctgcagtgctaaagagcagagc

SEQ ID NO: 1321 - DNA, 122 bp, Homo sapiens
  misc_feature (61)..(62): /note="This region represents a CpG dinucleotide"
  misc_feature (61)..(61): /note="Nucleotide may be methylated to form 5-methylcytosine"
acatttttgctgactggagtcatgctatctttgccagtttgctggaatagacacagacaccgattgggtcacgctgaagacattcctgtcttgtgaagcaagtctgtttgtattttaagttt

SEQ ID NO: 1322 - DNA, 122 bp, Homo sapiens
  misc_feature (61)..(62): /note="This region represents a CpG dinucleotide"
  misc_feature (61)..(61): /note="Nucleotide may be methylated to form 5-methylcytosine"
tccggggaagcactggaaacagcaggaccatcccgaaactgcttctgcagtgggaggcgccgggcgcccggctggccgggtggaaaccacgctgcagccgccgggccaagggcaccgcggtg

SEQ ID NO: 1323 - DNA, 122 bp, Homo sapiens
  misc_feature (61)..(62): /note="This region represents a CpG dinucleotide"
  misc_feature (61)..(61): /note="Nucleotide may be methylated to form 5-methylcytosine"
cagtctggcctgccactgtcccacctgggttcatgggcatatcagtttcttcatctgtgacgtggagctggtcgtattacctcagaggtattgtgacagccaaatgaaataatgctgtattt

SEQ ID NO: 1324 - DNA, 122 bp, Homo sapiens
  misc_feature (61)..(62): /note="This region represents a CpG dinucleotide"
  misc_feature (61)..(61): /note="Nucleotide may be methylated to form 5-methylcytosine"
gtctgagaccagcctgtgcaacagagcgagaccccgtctactaaaaattttaaaattagccgggtgcagtggtgcaggcctgtagtcttagctactcaggaggctgaggctggaggattgct

SEQ ID NO: 1325 - DNA, 122 bp, Homo sapiens
  misc_feature (61)..(62): /note="This region represents a CpG dinucleotide"
  misc_feature (61)..(61): /note="Nucleotide may be methylated to form 5-methylcytosine"
taagtatacccacaattattacgttggtcttccctggataatccaggataatctcctcatcgcaatatccttaacttgatcacacctgcaaacagactttttccaaataaggtcacacttac

SEQ ID NO: 1326 - DNA, 122 bp, Homo sapiens
  misc_feature (61)..(62): /note="This region represents a CpG dinucleotide"
  misc_feature (61)..(61): /note="Nucleotide may be methylated to form 5-methylcytosine"
caggtagtacgctgtgggccttgggctctgaaatgtgctgacttcaggtgagcccaagcacgtccagctgtggtggctatagtgaaaggctccatctttttgagaagcagaggggaaagtaa

SEQ ID NO: 1327 - DNA, 122 bp, Homo sapiens
  misc_feature (61)..(62): /note="This region represents a CpG dinucleotide"
  misc_feature (61)..(61): /note="Nucleotide may be methylated to form 5-methylcytosine"
aaaaaaaaaaaaaaaaaaaaaatagccgctttcccagcggctcttcctccagctgtccttcggggccttccttgcacctgtggggttttttgtgataaacctgtctggctgggtctacctgc

SEQ ID NO: 1328 - DNA, 122 bp, Homo sapiens
  misc_feature (61)..(62): /note="This region represents a CpG dinucleotide"
  misc_feature (61)..(61): /note="Nucleotide may be methylated to form 5-methylcytosine"
gtgctagaattacagccatgagccaccgcacctggccctggataccactgtttacagctgcgtggtcttgggcagcatgctaaacccttctgagcttcagtcttcttgcctttaagtcatta

SEQ ID NO: 1329 - DNA, 122 bp, Homo sapiens
  misc_feature (61)..(62): /note="This region represents a CpG dinucleotide"
  misc_feature (61)..(61): /note="Nucleotide may be methylated to form 5-methylcytosine"
cctgcgctcaaggggatgccaatcaaagcatcaacttcaaattgtgtctgaaagccccgccgccgagcggagggcggccgccgcagtcggcgcgcgattgcggatccgggcgcagccgggag

SEQ ID NO: 1330 - DNA, 122 bp, Homo sapiens
  misc_feature (61)..(62): /note="This region represents a CpG dinucleotide"
  misc_feature (61)..(61): /note="Nucleotide may be methylated to form 5-methylcytosine"
agtctccttcctccgccccttcccaggcttccctgacccagcgcgcagccaatccccgcccgccgtcgcgggcttctggtccaatcaccatggtctccccgcccacccccattgctccgccc

SEQ ID NO: 1331 - DNA, 122 bp, Homo sapiens
  misc_feature (61)..(62): /note="This region represents a CpG dinucleotide"
  misc_feature (61)..(61): /note="Nucleotide may be methylated to form 5-methylcytosine"
gggccgggtttgtttctgtttctaaaacgcggggctcagtcgaccaggaggggcgaggtccggggagtcccggcctttcggcgtcctctgccggatcccgggtttatggtcacctctccctc

SEQ ID NO: 1332 - DNA, 122 bp, Homo sapiens
  misc_feature (61)..(62): /note="This region represents a CpG dinucleotide"
  misc_feature (61)..(61): /note="Nucleotide may be methylated to form 5-methylcytosine"
gtgtgcaaggtgggggctgcacgtgcgggcttggggactgcgtgcaccaggggctgcaggcgctggggagggtgtggggggctgtgcgtggggctgccctcaccaaaggctgcacgctcagg

SEQ ID NO: 1333 - DNA, 122 bp, Homo sapiens
  misc_feature (61)..(62): /note="This region represents a CpG dinucleotide"
  misc_feature (61)..(61): /note="Nucleotide may be methylated to form 5-methylcytosine"
ggagggaagcatttctttgataacatttctcaaggttaaagtaccaaagacataccaaagcgccaacagaactaagtctcagggttatgaatgctgaatgaaatgaaggacattaaagattt

SEQ ID NO: 1334 - DNA, 122 bp, Homo sapiens
  misc_feature (61)..(62): /note="This region represents a CpG dinucleotide"
  misc_feature (61)..(61): /note="Nucleotide may be methylated to form 5-methylcytosine"
gaaaagcagacatatttatcccttacacatttgggttgtccttgctgcgtgtcctatgtccgttggctggagcaggacctcacaatcttaaactgatatccgatttgctaatagcctacaac

SEQ ID NO: 1335 - DNA, 122 bp, Homo sapiens
  misc_feature (61)..(62): /note="This region represents a CpG dinucleotide"
  misc_feature (61)..(61): /note="Nucleotide may be methylated to form 5-methylcytosine"
gccgccgccagcgcggacccctctacctgggccaccgccgctgagaggagccgggcgcgtcgccgccgccgccacctttataggcccggacctgctctggccccgcccccgacgcaggctcc

SEQ ID NO: 1336 - DNA, 122 bp, Homo sapiens
  misc_feature (61)..(62): /note="This region represents a CpG dinucleotide"
  misc_feature (61)..(61): /note="Nucleotide may be methylated to form 5-methylcytosine"
cagcctctactttcaagagcacactttataacatctctaaacaaatgaatcacggcatggcgatcaagggacagcttaattgtcagaggtctgctcctattactaggaagaaaagttgaaaa

SEQ ID NO: 1337 - DNA, 122 bp, Homo sapiens
  misc_feature (61)..(62): /note="This region represents a CpG dinucleotide"
  misc_feature (61)..(61): /note="Nucleotide may be methylated to form 5-methylcytosine"
gttaaaatgagggcattgattggaaaagaattggaccctgcaacttggaatggggatgtgcgggaggaccctgatgaatctggagacactcagcttgtaatctctgatgaaactttttttgc

SEQ ID NO: 1338 - DNA, 122 bp, Homo sapiens
  misc_feature (61)..(62): /note="This region represents a CpG dinucleotide"
  misc_feature (61)..(61): /note="Nucleotide may be methylated to form 5-methylcytosine"
agtatactgactcagtgtgctgtaaccgtcactgcttcatgtccagaactttttcatcatcggaaacagaaagtgtagctattaaatactaactccctccgttttctttcctttctgtctgt

SEQ ID NO: 1339 - DNA, 122 bp, Homo sapiens
  misc_feature (61)..(62): /note="This region represents a CpG dinucleotide"
  misc_feature (61)..(61): /note="Nucleotide may be methylated to form 5-methylcytosine"
agaagctgaacttgcacacatactatgtgactcatctccaaagcttaactttccccttggcgtaataaattaagagcgtcctaaaattacaatccacagataagtatagatacagcgcttta

SEQ ID NO: 1340 - DNA, 122 bp, Homo sapiens
  misc_feature (61)..(62): /note="This region represents a CpG dinucleotide"
  misc_feature (61)..(61): /note="Nucleotide may be methylated to form 5-methylcytosine"
gcatgggggcgggaccggaggcgggggccgacggagcagcgttgggggcgcggcaggaggcggggccgagaaggaccctggagggcaagggggagctagaggcggggaccgggccgagggag

SEQ ID NO: 1341 - DNA, 122 bp, Homo sapiens
  misc_feature (61)..(62): /note="This region represents a CpG dinucleotide"
  misc_feature (61)..(61): /note="Nucleotide may be methylated to form 5-methylcytosine"
gatgcggcgcgctttgataacaggttaatccggccaacattcgctccgcgagagagccatcggagggctccgggagactgcggcgccacggagggagaggcggcgagaggcccctctgcgag

SEQ ID NO: 1342 - DNA, 122 bp, Homo sapiens
  misc_feature (61)..(62): /note="This region represents a CpG dinucleotide"
  misc_feature (61)..(61): /note="Nucleotide may be methylated to form 5-methylcytosine"
tttctttctttctttttctttcttttctttttctttcttttctttttctttctgtctgtccgtctgtctgtctctctctgtttctttttttcctagtggggctacaacttatgcttaataca

SEQ ID NO: 1343 - DNA, 122 bp, Homo sapiens
  misc_feature (61)..(62): /note="This region represents a CpG dinucleotide"
  misc_feature (61)..(61): /note="Nucleotide may be methylated to form 5-methylcytosine"
gggactatctaagagccccagatacacaaaggcaaggcagaatgactggttttccctccgcgccttcctggtggaaccacatgttcatgagatgtattagagcgtgtcacattattcaggta

SEQ ID NO: 1344 - DNA, 122 bp, Homo sapiens
  misc_feature (61)..(62): /note="This region represents a CpG dinucleotide"
  misc_feature (61)..(61): /note="Nucleotide may be methylated to form 5-methylcytosine"
gccttctgttttgcctggacagggtcaccagaggtctccttggtctagcggtaatgccagcgtctgggaagacgcccgttgccaagctgaccatggtctagcggtagcctcagtgtcaagga

SEQ ID NO: 1345 - DNA, 122 bp, Homo sapiens
  misc_feature (61)..(62): /note="This region represents a CpG dinucleotide"
  misc_feature (61)..(61): /note="Nucleotide may be methylated to form 5-methylcytosine"
ccgcgcggcggcgggacataggatccccatcggggacctgggcgacggcctgagcttgggcgcccctccagctgggcgtcatctccacacagttcttcccttgcgccgcgaattcagcccct

SEQ ID NO: 1346 - DNA, 122 bp, Homo sapiens
  misc_feature (61)..(62): /note="This region represents a CpG dinucleotide"
  misc_feature (61)..(61): /note="Nucleotide may be methylated to form 5-methylcytosine"
agctattctcctgtctcagcctcctgagtagctgggattacaggcatgtgccaccacgcccggctaattttatgtctttttagtagatatgggggtttcaccatgttggtcaggctggtctc

SEQ ID NO: 1347 - DNA, 122 bp, Homo sapiens
  misc_feature (61)..(62): /note="This region represents a CpG dinucleotide"
  misc_feature (61)..(61): /note="Nucleotide may be methylated to form 5-methylcytosine"
gccggacgtggtggcatgcacctgtaatcctaccactttgcaaggccaaggtgagaggatcgcttgaacccaggagttccagagcaacctgggcaacatagtgagatcctgtctctattttt

SEQ ID NO: 1348 - DNA, 122 bp, Homo sapiens
  misc_feature (61)..(62): /note="This region represents a CpG dinucleotide"
  misc_feature (61)..(61): /note="Nucleotide may be methylated to form 5-methylcytosine"
cttttagtatccccttcagcctttctcttgggcatggtggcagcgctggcgggacgtaggcgcggggcgtgggatgcagtggggtgcaggctttggttggtctgggggtctttctcgcctct

SEQ ID NO: 1349 - DNA, 122 bp, Homo sapiens
  misc_feature (61)..(62): /note="This region represents a CpG dinucleotide"
  misc_feature (61)..(61): /note="Nucleotide may be methylated to form 5-methylcytosine"
ttgagggaagtacaaagcttaaccgtagacaggaacctggaaatgctgggtcagcctcttcgtctacccgtacatgacatacaaaattattccatgttacttcaatacttttacccagagcc

SEQ ID NO: 1350 - DNA, 122 bp, Homo sapiens
  misc_feature (61)..(62): /note="This region represents a CpG dinucleotide"
  misc_feature (61)..(61): /note="Nucleotide may be methylated to form 5-methylcytosine"
ccagtcgccgcggcctgagggcgccacaaagttggggacacgccggaagctttggtcccgcgagggcggtggcacggcccctggtggcggccgggattccccgggctcccgaaggggttacc

SEQ ID NO: 1351 - DNA, 122 bp, Homo sapiens
  misc_feature (61)..(62): /note="This region represents a CpG dinucleotide"
  misc_feature (61)..(61): /note="Nucleotide may be methylated to form 5-methylcytosine"
cttgtgcttagttttggatctgtaaacataaatcccaacctggattcttccctgggctgacggagttcagggagaaaggtagcagtagataagtcatatgctggaaaagcttggactctacc

SEQ ID NO: 1352 - DNA, 122 bp, Homo sapiens
  misc_feature (61)..(62): /note="This region represents a CpG dinucleotide"
  misc_feature (61)..(61): /note="Nucleotide may be methylated to form 5-methylcytosine"
gagctctgcgctggcggctgtggggggccggcgctcaggaccccaactccatccaagttgcgccgcggtgggggcgggcggaggcggcgccgggcaggtggcggccgcttgcccgggctggg

SEQ ID NO: 1353 - DNA, 122 bp, Homo sapiens
  misc_feature (61)..(62): /note="This region represents a CpG dinucleotide"
  misc_feature (61)..(61): /note="Nucleotide may be methylated to form 5-methylcytosine"
accgaggagctgcccctcggctcatgggctctgtggtcgccaggcacgccacacaccacacgccacacaccactgcacgcagcaccccgggacactgtggcctcggctcccgcctctcctgc

SEQ ID NO: 1354 - DNA, 122 bp, Homo sapiens
  misc_feature (61)..(62): /note="This region represents a CpG dinucleotide"
  misc_feature (61)..(61): /note="Nucleotide may be methylated to form 5-methylcytosine"
tggacaggaatgccaagttagtctctcttcataaaaataatttgcaatttgaggacacttcgtgtttgcccctttgcgtttgcctctttgccagcaccaagtcagcctcgtctgagtctttg

SEQ ID NO: 1355 - DNA, 122 bp, Homo sapiens
  misc_feature (61)..(62): /note="This region represents a CpG dinucleotide"
  misc_feature (61)..(61): /note="Nucleotide may be methylated to form 5-methylcytosine"
ttaaattttaatccacagggggtatttcctttcctgtttacccgagcgaagagtggcccccggtggcccaaggaggggcgcctccaggcgcagggctccggcggctccagctgctcccgggc

SEQ ID NO: 1356 - DNA, 122 bp, Homo sapiens
  misc_feature (61)..(62): /note="This region represents a CpG dinucleotide"
  misc_feature (61)..(61): /note="Nucleotide may be methylated to form 5-methylcytosine"
gcctggctgggcttaccaactgactttgggtgacctagtgtctctgagcctcagtttctccgttggtaaggaaaagggctggattgttagggtgttttcaggattccaagaccacagccaaa

SEQ ID NO: 1357 - DNA, 122 bp, Homo sapiens
  misc_feature (61)..(62): /note="This region represents a CpG dinucleotide"
  misc_feature (61)..(61): /note="Nucleotide may be methylated to form 5-methylcytosine"
aagagattgaggtgaggcaggagaatagggtctgcaggcagggaacataaagctgattcacgctgacttcttagaactaaataaaatggacacatttcagctatgacaggaaatattttctt

SEQ ID NO: 1358 - DNA, 122 bp, Homo sapiens
  misc_feature (61)..(62): /note="This region represents a CpG dinucleotide"
  misc_feature (61)..(61): /note="Nucleotide may be methylated to form 5-methylcytosine"
caggtgatctgtccttcttgcctcccaaagtgctgggattacaggcgtgagccactgccccggcttggtttgttttttgagacatggtctcactctgtcgcacaggacggagtgcagtagtg

SEQ ID NO: 1359 - DNA, 122 bp, Homo sapiens
  misc_feature (61)..(62): /note="This region represents a CpG dinucleotide"
  misc_feature (61)..(61): /note="Nucleotide may be methylated to form 5-methylcytosine"
ctctcttgcctcttaagtttcctgcaccgtgaatccaactgtgccaagccttggctcccgcgaaccaatcctgagcgcgacccgggcactgggacggcgactccgccaaagctggacgaggc

SEQ ID NO: 1360 - DNA, 122 bp, Homo sapiens
  misc_feature (61)..(62): /note="This region represents a CpG dinucleotide"
  misc_feature (61)..(61): /note="Nucleotide may be methylated to form 5-methylcytosine"
gtactccctgttcatacaccctctccccttttcaaatccctaataaaatcttgctggtttcgcggcttaggtggacatcacggacctaccaatatgatgtcacccctggaggcccagctgta

SEQ ID NO: 1361 - DNA, 122 bp, Homo sapiens
  misc_feature (61)..(62): /note="This region represents a CpG dinucleotide"
  misc_feature (61)..(61): /note="Nucleotide may be methylated to form 5-methylcytosine"
caaaaatatctatgttaacacagtgtatgtaatcccagtgctttgggaggctgaagtgggcgaatgacttgagctcaggaggtcaagaccagcctggacaatgtggcaaaaaaaaccccatc

SEQ ID NO: 1362 - DNA, 122 bp, Homo sapiens
  misc_feature (61)..(62): /note="This region represents a CpG dinucleotide"
  misc_feature (61)..(61): /note="Nucleotide may be methylated to form 5-methylcytosine"
tttatttcatgattacttttaacatgctttttctgtattttccagttattctgtcattatcgagctagttgatgaccattttgaaggctctctccgcaggcctctcagttggaagtccctgg

SEQ ID NO: 1363 - DNA, 122 bp, Homo sapiens
  misc_feature (61)..(62): /note="This region represents a CpG dinucleotide"
  misc_feature (61)..(61): /note="Nucleotide may be methylated to form 5-methylcytosine"
agttcccccgtcgcttccgccgccgtgggtagaacagacccgagctgggagccaggcctgcggcccctcgaacactagccacatctggcccgccgggcctagcacggagagaggccctgggg

SEQ ID NO: 1364 - DNA, 122 bp, Homo sapiens
  misc_feature (61)..(62): /note="This region represents a CpG dinucleotide"
  misc_feature (61)..(61): /note="Nucleotide may be methylated to form 5-methylcytosine"
cctggcgcgaccgccagcagcacccagcgcggggccgggagctgctgggggcccaggctccgctctccccaccgctctgcaccgctgccggctgcggacagacccgatgcgccaccaccacc

SEQ ID NO: 1365 - DNA, 122 bp, Homo sapiens
  misc_feature (61)..(62): /note="This region represents a CpG dinucleotide"
  misc_feature (61)..(61): /note="Nucleotide may be methylated to form 5-methylcytosine"
tgtgatcaggctgcaaattttccaaattttatgctctgcttaccttttaaatctaagttccggtttcaggtcatctctttgctcatgcttaacaaaagcaatctttgctccagttcccaata

SEQ ID NO: 1366 - DNA, 122 bp, Homo sapiens
  misc_feature (61)..(62): /note="This region represents a CpG dinucleotide"
  misc_feature (61)..(61): /note="Nucleotide may be methylated to form 5-methylcytosine"
tgcagtctcagaaaactaggaaggtcaggaattgagtctgttattagctgatctcatctccgacaaaaaaaaaaaaaagagagagagagagaattgagcctgttgtagtgcacagcattcta

SEQ ID NO: 1367 - DNA, 122 bp, Homo sapiens
  misc_feature (61)..(62): /note="This region represents a CpG dinucleotide"
  misc_feature (61)..(61): /note="Nucleotide may be methylated to form 5-methylcytosine"
ttttttggagatggggtcttgctgcattgcccaggcattgcggcctcgaacttctgggctcgactgttcctcctgccttagcctcctgagtagctgggactacaggtgcgtgccaccacgcc

SEQ ID NO: 1368 - DNA, 122 bp, Homo sapiens
  misc_feature (61)..(62): /note="This region represents a CpG dinucleotide"
  misc_feature (61)..(61): /note="Nucleotide may be methylated to form 5-methylcytosine"
cactcagagtgtcaggaagcacaggagcgtaaatatttagagaaagccgggagccagcagcgccgcacccccgccagcctacatccacgcagagagatcgcactattctcatatccacagtt

SEQ ID NO: 1369 - DNA, 122 bp, Homo sapiens
  misc_feature (61)..(62): /note="This region represents a CpG dinucleotide"
  misc_feature (61)..(61): /note="Nucleotide may be methylated to form 5-methylcytosine"
ccgttcagtattcaacatgtcaaggcaccgtgctttggggtattatgtcctgagccccaacgtaagatgtttacacttttgattgtaaatgccagcaaaacaaaacttcatgaaatatgtaa

SEQ ID NO: 1370 - DNA, 122 bp, Homo sapiens
  misc_feature (61)..(62): /note="This region represents a CpG dinucleotide"
  misc_feature (61)..(61): /note="Nucleotide may be methylated to form 5-methylcytosine"
gctgttttccttgctagcagggtgttatggattgaactgtcacccccaaaaagctgttgacgtcctaacccccagttgtgtgaatgtgaccttatttggaaaaagagtctgctggtcaatca

SEQ ID NO: 1371 - DNA, 122 bp, Homo sapiens
  misc_feature (61)..(62): /note="This region represents a CpG dinucleotide"
  misc_feature (61)..(61): /note="Nucleotide may be methylated to form 5-methylcytosine"
tccaggcctcgcccttccgcaccgccccaaagtctgacttgcaggctcgggccgcagacccgcaggcttcagaaggcagccccagctcccccgagaggtggccttaggtcactcgcaaaaac

SEQ ID NO: 1372 - DNA, 122 bp, Homo sapiens
  misc_feature (61)..(62): /note="This region represents a CpG dinucleotide"
  misc_feature (61)..(61): /note="Nucleotide may be methylated to form 5-methylcytosine"
ttcgcgggccgcaagctcggagacgcgcgtgtcccgcgttggctgcctgacccggaatggcgcagccccttcgcctccagcgcgctggttgaaaggatccgagccaccctcggggacggccg

SEQ ID NO: 1373 - DNA, 122 bp, Homo sapiens
  misc_feature (61)..(62): /note="This region represents a CpG dinucleotide"
  misc_feature (61)..(61): /note="Nucleotide may be methylated to form 5-methylcytosine"
tctaaagagaaagatagactcctatacagtaatagttggggacttcaacactgctctcagcgttggaaagatcatttgcacagaaaacaaaggcatcagatttagatagtatttcagacata

SEQ ID NO: 1374 - DNA, 122 bp, Homo sapiens
  misc_feature (61)..(62): /note="This region represents a CpG dinucleotide"
  misc_feature (61)..(61): /note="Nucleotide may be methylated to form 5-methylcytosine"
ctagtggtagtaaaggagactacccctgataatatggatgggcctcatccaattcttggacggccttaagtgaaaaaactgaggtttcctagagcagaagaaatcctgccttaagattgcaa

SEQ ID NO: 1375 - DNA, 122 bp, Homo sapiens
  misc_feature (61)..(62): /note="This region represents a CpG dinucleotide"
  misc_feature (61)..(61): /note="Nucleotide may be methylated to form 5-methylcytosine"
aggtccgcagggcgctgacccctgggggcccgaggagcgccgggctgctgccccgagccccgcccactacagcctcagtgcatggcggtgggcgcttccagtaactcaggggtgggactttt

SEQ ID NO: 1376 - DNA, 122 bp, Homo sapiens
  misc_feature (61)..(62): /note="This region represents a CpG dinucleotide"
  misc_feature (61)..(61): /note="Nucleotide may be methylated to form 5-methylcytosine"
cctcatcttttgtggcaatgtgacaaggaccccgtctttagctgaactgagcaaaagtcccgcaacagtgtgagacccccaagtcaaaggtgagccatgcacgtgatctctcaggtctcccg

SEQ ID NO: 1377 - DNA, 122 bp, Homo sapiens
  misc_feature (61)..(62): /note="This region represents a CpG dinucleotide"
  misc_feature (61)..(61): /note="Nucleotide may be methylated to form 5-methylcytosine"
acttcttcaaatatgcagacaccagtgcaagtccataaggatctcaaatgatcagggaaacgtgacaccatcaaaggaacaaaataaagctttagctatgataatttgttgataaatatata

SEQ ID NO: 1378 - DNA, 122 bp, Homo sapiens
  misc_feature (61)..(62): /note="This region represents a CpG dinucleotide"
  misc_feature (61)..(61): /note="Nucleotide may be methylated to form 5-methylcytosine"
cttaacccatttcagagtttattacggggctttgtatttttttccttttctttgccagatcgcttatgctaagggcagtgatggtttccatcgtggtcagcattgtatccccggcgcctagc

SEQ ID NO: 1379 - DNA, 122 bp, Homo sapiens
  misc_feature (61)..(62): /note="This region represents a CpG dinucleotide"
  misc_feature (61)..(61): /note="Nucleotide may be methylated to form 5-methylcytosine"
gctccattgagaaactgagcgtctcattcacaagctggcggcgaggagggcccggcggagcgaggacgcagtccgggagggggagacagagaggagcccgggcgggggaggggaccgggagg

SEQ ID NO: 1380 - DNA, 122 bp, Homo sapiens
  misc_feature (61)..(62): /note="This region represents a CpG dinucleotide"
  misc_feature (61)..(61): /note="Nucleotide may be methylated to form 5-methylcytosine"
ctccggccggcctccgcctccctccccgcgcctttaatactcgcccgctgcggcggtcgccgagtccgcggacatgtccttcccgcagctgggctacccgcagtacctgagcgccgcggggc

SEQ ID NO: 1381 - DNA, 122 bp, Homo sapiens
  misc_feature (61)..(62): /note="This region represents a CpG dinucleotide"
  misc_feature (61)..(61): /note="Nucleotide may be methylated to form 5-methylcytosine"
gagttggatgagcttgagttaatttgttcaaattcttcagaagtctgtttcctccaactccgaggtgtggcagggggtgggagtaagaggaaaatgtatgcgtactgggtgcttaccctatg

SEQ ID NO: 1382 - DNA, 122 bp, Homo sapiens
  misc_feature (61)..(62): /note="This region represents a CpG dinucleotide"
  misc_feature (61)..(61): /note="Nucleotide may be methylated to form 5-methylcytosine"
gaggtaattgaacaatgggggcggtttctcccaagctgttctcatgatagtgacttctcacgagatctgatggttttctaagggcctgttccctgcttcacttggcatttctccttcctgct

SEQ ID NO: 1383 - DNA, 122 bp, Homo sapiens
  misc_feature (61)..(62): /note="This region represents a CpG dinucleotide"
  misc_feature (61)..(61): /note="Nucleotide may be methylated to form 5-methylcytosine"
ttctgcatcatgatattcaaataatgcattttagtcagccccttcctggacatctgagctcgtttggcacagtcgatgatgttctccttcacagttagttcctggttcataactcccacatc

SEQ ID NO: 1384 - DNA, 122 bp, Homo sapiens
  misc_feature (61)..(62): /note="This region represents a CpG dinucleotide"
  misc_feature (61)..(61): /note="Nucleotide may be methylated to form 5-methylcytosine"
gtcactgcctagctgggtgaccttgggcaagttacctctctgaacctcaatttcctaatccgtggaatgagataacaataccaccagcagcaggcggttgttgtggggattagatgggataa

SEQ ID NO: 1385 - DNA, 122 bp, Homo sapiens
  misc_feature (61)..(62): /note="This region represents a CpG dinucleotide"
  misc_feature (61)..(61): /note="Nucleotide may be methylated to form 5-methylcytosine"
gaaccttgccctttgctttctattacttgtgcatttgcctcacctgacaatgttttaaatcgcctttgtatctccttagctgctcaataaatatttgaatgcatcaattaagaatgtatgtg

SEQ ID NO: 1386 - DNA, 122 bp, Homo sapiens
  misc_feature (61)..(62): /note="This region represents a CpG dinucleotide"
  misc_feature (61)..(61): /note="Nucleotide may be methylated to form 5-methylcytosine"
ttataagctggggaaaaaatagtacctacctctcaattgtgaggattaaattagatcaagcgggttaaggatttagcagtagtagagctggaaaagaatatataaaatatatattattaatt

SEQ ID NO: 1387 - DNA, 122 bp, Homo sapiens
  misc_feature (61)..(62): /note="This region represents a CpG dinucleotide"
  misc_feature (61)..(61): /note="Nucleotide may be methylated to form 5-methylcytosine"
ccagggactataattatcagaattgctgtgagcttgcaaaaggttaagaaaatctggatccgggcgctccagctgacactcatgctatttaggaccatcactacagctgcaaacaaatagag

SEQ ID NO: 1388 - DNA, 122 bp, Homo sapiens
  misc_feature (61)..(62): /note="This region represents a CpG dinucleotide"
  misc_feature (61)..(61): /note="Nucleotide may be methylated to form 5-methylcytosine"
ggtgaagggtggggattgatcagaggaaagtgtgccaagtgggaagaggggttatcaatccggtccgtggatttacccaacacttgtagcttggctttcaggctttaaactgtctttggttt

SEQ ID NO: 1389 - DNA, 122 bp, Homo sapiens
  misc_feature (61)..(62): /note="This region represents a CpG dinucleotide"
  misc_feature (61)..(61): /note="Nucleotide may be methylated to form 5-methylcytosine"
aagtttcaattgtcagagtcatccagtttacggtgcgggttgagaatcccttatctgaaacgctggggaccagaagtgttttaggtttcagattttggaatatttgcattgaatataccagt

SEQ ID NO: 1390 - DNA, 122 bp, Homo sapiens
  misc_feature (61)..(62): /note="This region represents a CpG dinucleotide"
  misc_feature (61)..(61): /note="Nucleotide may be methylated to form 5-methylcytosine"
ggtcctttgggccccacccccacccaccccaccggcgggtcttgggctccgaacccagggcgccccgcgcaccgagccgttgcgtttgaaacccacagaaagaattcccccgctcgacgacg

SEQ ID NO: 1391 - DNA, 122 bp, Homo sapiens
  misc_feature (61)..(62): /note="This region represents a CpG dinucleotide"
  misc_feature (61)..(61): /note="Nucleotide may be methylated to form 5-methylcytosine"
accgggcgctcaccacgggtgttgggacaagcagcggagcctgcgggctggagccaggctcggaccctccgcgccggggcgggcggccgagcggacgcagctggcagtggcggcgggagagc

SEQ ID NO: 1392 - DNA, 122 bp, Homo sapiens
  misc_feature (61)..(62): /note="This region represents a CpG dinucleotide"
  misc_feature (61)..(61): /note="Nucleotide may be methylated to form 5-methylcytosine"
ggtttccctatgatccccaggctggtctccaattcctggcctcaagcggtcctcccggctcggactcccaaagagctgggatcacagacgtgaaccacgcgcccggccacattccccaatta

SEQ ID NO: 1393 - DNA, 122 bp, Homo sapiens
  misc_feature (61)..(62): /note="This region represents a CpG dinucleotide"
  misc_feature (61)..(61): /note="Nucleotide may be methylated to form 5-methylcytosine"
gatgaggctcaaaaaggccattcatctgaagaagctcaatttcctgaagtcacagaaatacgcagagcaagtatctgaacccaagtcagatgatggtttgacaaagaggttggaatctgcta

SEQ ID NO: 1394 - DNA, 122 bp, Homo sapiens
  misc_feature (61)..(62): /note="This region represents a CpG dinucleotide"
  misc_feature (61)..(61): /note="Nucleotide may be methylated to form 5-methylcytosine"
cccgcgcgagcgagggacgccgacgtgccagggagccaataggcgcagcgctcgtgagcccgtcagcggactcggctcggactccgctgctcttttgagaacccgcacatccctgagcccgc

SEQ ID NO: 1395 - DNA, 122 bp, Homo sapiens
  misc_feature (61)..(62): /note="This region represents a CpG dinucleotide"
  misc_feature (61)..(61): /note="Nucleotide may be methylated to form 5-methylcytosine"
ggaactcttgacttcaagcgatcctcccgcctcggcctcccaaagtgctgggatgacaggcgtgagccaccgcgccgggtctcatttaaatttataggaaacttgtggtaaaaatagcaaaa

SEQ ID NO: 1396 - DNA, 122 bp, Homo sapiens
  misc_feature (61)..(62): /note="This region represents a CpG dinucleotide"
  misc_feature (61)..(61): /note="Nucleotide may be methylated to form 5-methylcytosine"
tctgaggaatgcaagcccctctaaattatcaggcccagagaggcatttaaaatgtaaaagcggttatgtctcactttccctgtgcttaatagttacctctggaagccacttgctttgcaggc

SEQ ID NO: 1397 - DNA, 122 bp, Homo sapiens
  misc_feature (61)..(62): /note="This region represents a CpG dinucleotide"
  misc_feature (61)..(61): /note="Nucleotide may be methylated to form 5-methylcytosine"
gtggcggcgtcgagtccgagcggggaagcccctttgcgggaactctggggcggggcggggcggggaggtgggtagggagggtcccgccagcagaggcatcttatttttaacctcttctcggc

SEQ ID NO: 1398 - DNA, 122 bp, Homo sapiens
  misc_feature (61)..(62): /note="This region represents a CpG dinucleotide"
  misc_feature (61)..(61): /note="Nucleotide may be methylated to form 5-methylcytosine"
cagagttaccaaatgggctccttagtcatggcttggggctccacgaccctcctggaagcccggagcctgggtgggatagcgaggctgcgcgcggccggcgccccggggctggtgcgcggcag

SEQ ID NO: 1399 - DNA, 122 bp, Homo sapiens
  misc_feature (61)..(62): /note="This region represents a CpG dinucleotide"
  misc_feature (61)..(61): /note="Nucleotide may be methylated to form 5-methylcytosine"
ccatttagtgtgaatcctggatccggcagcggcggcggcttcttcaggggtagctgatgccggggccttggagagggacgctttgggagggtcctgggaggcggcgcggcgagcaaaggggg

SEQ ID NO: 1400 - DNA, 122 bp, Homo sapiens
  misc_feature (61)..(62): /note="This region represents a CpG dinucleotide"
  misc_feature (61)..(61): /note="Nucleotide may be methylated to form 5-methylcytosine"
cttttactttttgaaccataagattgtttatccattaaaatggtattaaaatgcccactacgtagggttgttgtattgagtagcaactaaaaattgcttgctcctttctgaagtatagagaa

SEQ ID NO: 1401 - DNA, 122 bp, Homo sapiens
  misc_feature (61)..(62): /note="This region represents a CpG dinucleotide"
  misc_feature (61)..(61): /note="Nucleotide may be methylated to form 5-methylcytosine"
gtctcttcctcttcttctacaggcactaattccatcatagggaccctgccttcatgatctcgcctaagcctaactacctccaaaggccgtgcctcctaataccatcaccttgatgggttaag

SEQ ID NO: 1402 - DNA, 122 bp, Homo sapiens
  misc_feature (61)..(62): /note="This region represents a CpG dinucleotide"
  misc_feature (61)..(61): /note="Nucleotide may be methylated to form 5-methylcytosine"
aggtggggcctggtgggaggtatttgggtcatggggctggatccctcataaatgacttggcgccattctcacgggagagagtgagctctcactcttagttcccgctagaactggttgttgac

SEQ ID NO: 1403 - DNA, 122 bp, Homo sapiens
  misc_feature (61)..(62): /note="This region represents a CpG dinucleotide"
  misc_feature (61)..(61): /note="Nucleotide may be methylated to form 5-methylcytosine"
aggtcaagggaagacctccatattatttttctcttcctcatacatttatttatttagagacggagtctccctctgtcgcctaggttggagtgcagtggcgcgatctcggctcactgcagcct

SEQ ID NO: 1404 - DNA, 122 bp, Homo sapiens
  misc_feature (61)..(62): /note="This region represents a CpG dinucleotide"
  misc_feature (61)..(61): /note="Nucleotide may be methylated to form 5-methylcytosine"
ccgcagcccgccgcgagcaccaaggaagccacagtccgcctctgtgcgcgtcgccgtcgccgccgccgccgccaccacccgccaaacacagcaccggcgagcgcacctccgcgccgccgccg

SEQ ID NO: 1405 - DNA, 122 bp, Homo sapiens
  misc_feature (61)..(62): /note="This region represents a CpG dinucleotide"
  misc_feature (61)..(61): /note="Nucleotide may be methylated to form 5-methylcytosine"
taaaaaaaattttattttttgtttttatttcaataaagttttgggggaacaggtggtgttcggttacatggataagttctttagtagattttggtgcacctgtcacctgaacagtgtacact

SEQ ID NO: 1406 - DNA, 122 bp, Homo sapiens
  misc_feature (61)..(62): /note="This region represents a CpG dinucleotide"
  misc_feature (61)..(61): /note="Nucleotide may be methylated to form 5-methylcytosine"
gcattgggtgattccaaagctggaagggcagcggaatggccttagccccgtcctgcccttcgcaggcgtcagagccagcgtcccgggaaacgcccgggtccgcgacttcccaaaggaagcag

SEQ ID NO: 1407 - DNA, 122 bp, Homo sapiens
  misc_feature (61)..(62): /note="This region represents a CpG dinucleotide"
  misc_feature (61)..(61): /note="Nucleotide may be methylated to form 5-methylcytosine"
tgctgttcaaactcagaccaaaagagataggctttttttcccccagagggtgcacaaatacgaccagaatttgtgaagacgagtcagaaatgaatgaaatttggaaaaatattgatctactg

SEQ ID NO: 1408 - DNA, 122 bp, Homo sapiens
  misc_feature (61)..(62): /note="This region represents a CpG dinucleotide"
  misc_feature (61)..(61): /note="Nucleotide may be methylated to form 5-methylcytosine"
ctcgggccggatcgcccggcggggaagatgcgcctcaagaaccaggtagaagcgcctcggcgcaggccccgcacccccgactctgcccgccctctgttacggacacccgctgggccacgtgg

SEQ ID NO: 1409 - DNA, 122 bp, Homo sapiens
  misc_feature (61)..(62): /note="This region represents a CpG dinucleotide"
  misc_feature (61)..(61): /note="Nucleotide may be methylated to form 5-methylcytosine"
agcttacctcatggacttgtcattaggcccaaatcagataatataggtgaaagtgctttgcgtaatgtcaagaaccctgccagtgaaaatcatagtgcctccaaggagctacttaagtttct

SEQ ID NO: 1410 - DNA, 122 bp, Homo sapiens
  misc_feature (61)..(62): /note="This region represents a CpG dinucleotide"
  misc_feature (61)..(61): /note="Nucleotide may be methylated to form 5-methylcytosine"
gtagatttgcagataaatcggcttttgctcttccacctttcattttaactagcagctaatcgccttcaaatctacacaggcagcattaattaaagcgatgttggcctggcgcagtggctcac

SEQ ID NO: 1411 - DNA, 122 bp, Homo sapiens
  misc_feature (61)..(62): /note="This region represents a CpG dinucleotide"
  misc_feature (61)..(61): /note="Nucleotide may be methylated to form 5-methylcytosine"
aagtctctcatatactctcctaagggcttctttgtctttccaaaaagtcatttattttcccgtaagtgtcctttatcccccaccccatctctattaaggtgatatataaggcccaaaatcta

SEQ ID NO: 1412 - DNA, 122 bp, Homo sapiens
  misc_feature (61)..(62): /note="This region represents a CpG dinucleotide"
  misc_feature (61)..(61): /note="Nucleotide may be methylated to form 5-methylcytosine"
ggggaaagagcagaaaaaaaaaaccaaccataacaacaacaacaacagaaagcagagaaacgaaggtctggtgctagtacaaggaaagaaagcaacatggcagaggaccatattgactagtg

SEQ ID NO: 1413 - DNA, 122 bp, Homo sapiens
  misc_feature (61)..(62): /note="This region represents a CpG dinucleotide"
  misc_feature (61)..(61): /note="Nucleotide may be methylated to form 5-methylcytosine"
gcagagttcaagagtctttcatcctttttactttctgtgacaccacactgacattcttgacgttttctttttggtttctccaaggaaatacagaccaattctgtatatgtattaagcatgtc

SEQ ID NO: 1414 - DNA, 122 bp, Homo sapiens
  misc_feature (61)..(62): /note="This region represents a CpG dinucleotide"
  misc_feature (61)..(61): /note="Nucleotide may be methylated to form 5-methylcytosine"
ggactgtggctttatccctgaggccaggcttcatgtccagatggccatgccagaggttgacgtggcagagaaggagtgtgacacaggccagtggagcgagtggagccagcctgtgtgcttcc

SEQ ID NO: 1415 - DNA, 122 bp, Homo sapiens
  misc_feature (61)..(62): /note="This region represents a CpG dinucleotide"
  misc_feature (61)..(61): /note="Nucleotide may be methylated to form 5-methylcytosine"
ccctccgcaaagctccggccggtcctcagctccgtgccacaccagtctggcctgtaggcccgccccagcccgcccccgcccgcccccggctccgccctcaggctggcacccactccgccccc

SEQ ID NO: 1416 - DNA, 122 bp, Homo sapiens
  misc_feature (61)..(62): /note="This region represents a CpG dinucleotide"
  misc_feature (61)..(61): /note="Nucleotide may be methylated to form 5-methylcytosine"
tttttttttttttttaaatatagacagtctccctctgttgttcaggccaaagtgcagtgtcgtgatcacagctcactgcagcctctgactcctaggttcaagcatcctcccacctcagcctc

SEQ ID NO: 1417 - DNA, 122 bp, Homo sapiens
  misc_feature (61)..(62): /note="This region represents a CpG dinucleotide"
  misc_feature (61)..(61): /note="Nucleotide may be methylated to form 5-methylcytosine"
acactcaccatgtgaccaagcagttccactcctgggtatataccctgaaagaaatgagtgcgtacacacaccaaaaaacatgtacaaaaatacacattgctgctaaatcgataacagccaaa

SEQ ID NO: 1418 - DNA, 122 bp, Homo sapiens
  misc_feature (61)..(62): /note="This region represents a CpG dinucleotide"
  misc_feature (61)..(61): /note="Nucleotide may be methylated to form 5-methylcytosine"
taaacctaaaagtagttgacaggctgggcgcagtggctcatggctgtaattacagcacttcgggaggctgaggcgggaggatcccttgaccccgggagttccaggatgcagtgagctatgac

SEQ ID NO: 1419 - DNA, 122 bp, Homo sapiens
  misc_feature (61)..(62): /note="This region represents a CpG dinucleotide"
  misc_feature (61)..(61): /note="Nucleotide may be methylated to form 5-methylcytosine"
aatggtttttgcatttttcagtggttcaaaataaatcaagagaccagttgcaagggctcacgcttataatcccagcactttgagacgccgaggcaggcagatcacttgagcccaggagttca

SEQ ID NO: 1420 - DNA, 122 bp, Homo sapiens
  misc_feature (61)..(62): /note="This region represents a CpG dinucleotide"
  misc_feature (61)..(61): /note="Nucleotide may be methylated to form 5-methylcytosine"
gggagtggctcaggaaacttacaattatggcagaaggggaagcaagcatgtcttacatggcggcaggagagagcacatgtgaaggaggaactgtcaaacactcacaaaaacatcagatctca

SEQ ID NO: 1421 - DNA, 122 bp, Homo sapiens
  misc_feature (61)..(62): /note="This region represents a CpG dinucleotide"
  misc_feature (61)..(61): /note="Nucleotide may be methylated to form 5-methylcytosine"
ccttaaccaggagggcagctccctgaaggtgggacagggtgcccgccaccctgtctgatacgtgctttgcagataaggtggctcaccccatctgaccagctgccaccagctcctttgtaagg

SEQ ID NO: 1422 - DNA, 122 bp, Homo sapiens
  misc_feature (61)..(62): /note="This region represents a CpG dinucleotide"
  misc_feature (61)..(61): /note="Nucleotide may be methylated to form 5-methylcytosine"
ccaccccccatgactaagcttcttcagaaatagaacttccatgtctcttcccaacacaagcgttttatatgtattttgttgaagaatttaaaatgtgatctatgaaattattactcatttat

SEQ ID NO: 1423 - DNA, 122 bp, Homo sapiens
  misc_feature (61)..(62): /note="This region represents a CpG dinucleotide"
  misc_feature (61)..(61): /note="Nucleotide may be methylated to form 5-methylcytosine"
gctcgcgggggggctcgcgggggggctcgcggggggctggcggggggctggcggggggctcgcgggggggctcgcgggggggctcgcgggggggctcgcggggggctcgcgggggggctcgc

SEQ ID NO: 1424 - DNA, 122 bp, Homo sapiens
  misc_feature (61)..(62): /note="This region represents a CpG dinucleotide"
  misc_feature (61)..(61): /note="Nucleotide may be methylated to form 5-methylcytosine"
gagatgggggctgcggtgactcgcgggatcaggaatttcaacctagagaacccagcggaacgggaaatcagcaagatgaagccctctcccactcccggttacccctctaccaacagcctcct

SEQ ID NO: 1425 - DNA, 122 bp, Homo sapiens
  misc_feature (61)..(62): /note="This region represents a CpG dinucleotide"
  misc_feature (61)..(61): /note="Nucleotide may be methylated to form 5-methylcytosine"
attgtatcatccagcctccttccagcagctctctccagttcttgtctgtgatgatgcgtacgttgctctgccgcctgtgggtccagggagcacccccaagcaacagtaccaggactgccagc

SEQ ID NO: 1426 - DNA, 122 bp, Homo sapiens
  misc_feature (61)..(62): /note="This region represents a CpG dinucleotide"
  misc_feature (61)..(61): /note="Nucleotide may be methylated to form 5-methylcytosine"
gcccaacatcattagtcattaaagaaataaaagtgaaaaccacaatgagatacctcttcacgctcactagggtggcaaatttcaaaaggcagataataacaagttttggcaaggatgtggaa

SEQ ID NO: 1427 - DNA, 122 bp, Homo sapiens
  misc_feature (61)..(62): /note="This region represents a CpG dinucleotide"
  misc_feature (61)..(61): /note="Nucleotide may be methylated to form 5-methylcytosine"
ccccggcggggattagaagcgaggcgggttcagcgtcctgggcgccgcaggaaagtgacccgcagagcgaggcgcggcgccccgggagctggagctcagccccacgacccgcgctgcggcgg

SEQ ID NO: 1428 - DNA, 122 bp, Homo sapiens
  misc_feature (61)..(62): /note="This region represents a CpG dinucleotide"
  misc_feature (61)..(61): /note="Nucleotide may be methylated to form 5-methylcytosine"
ttttttttttttttagagatagggtctcactctgtcgccccaggctggagtggagtgatgcggtcatggcttactgcagcctagaactcctggcctcaagggatcctcctacactggcctcc

SEQ ID NO: 1429 - DNA, 122 bp, Homo sapiens
  misc_feature (61)..(62): /note="This region represents a CpG dinucleotide"
  misc_feature (61)..(61): /note="Nucleotide may be methylated to form 5-methylcytosine"
tgaacttctcttgcccttgcccagcatcctacatctttaatccatactgttccctatatccgttaatggcctcaccacatgtccagaagctccgctcagaaagctgtgattctgagttctcc

SEQ ID NO: 1430 - DNA, 122 bp, Homo sapiens
  misc_feature (61)..(62): /note="This region represents a CpG dinucleotide"
  misc_feature (61)..(61): /note="Nucleotide may be methylated to form 5-methylcytosine"
cggccgctcccgggggctcctcctgcgtccccagcgcccacgccccgccccacctggctccgctgcacccgcagccacagcgcccgcccgggacacctgcccctccacggccgcgcgggcgg

SEQ ID NO: 1431 - DNA, 122 bp, Homo sapiens
  misc_feature (61)..(62): /note="This region represents a CpG dinucleotide"
  misc_feature (61)..(61): /note="Nucleotide may be methylated to form 5-methylcytosine"
caccattctcctgcctcagcctcccaggtagctgggactacaggcgcccgccaccacgcccggctaatttttttgtaattttttagtggagatgggttttcaccatgttagccaggatggtc

SEQ ID NO: 1432 - DNA, 122 bp, Homo sapiens
  misc_feature (61)..(62): /note="This region represents a CpG dinucleotide"
  misc_feature (61)..(61): /note="Nucleotide may be methylated to form 5-methylcytosine"
aactcccaagcccatgcatcctcttgccctcttcccttgttgctttaaaagacaaacatgcgcctgtagtcccagctactcgggaggctgaggcaggagaatggcgtgaaccccggggggcg

SEQ ID NO: 1433 - DNA, 122 bp, Homo sapiens
  misc_feature (61)..(62): /note="This region represents a CpG dinucleotide"
  misc_feature (61)..(61): /note="Nucleotide may be methylated to form 5-methylcytosine"
gggccctcgggcttggagggctgggccgggcggggaacgggcggggcgggccggaggcggcggcggctgactcgccttctctccggggctgcgaccccgaggcaaccggctgcagatgggag

SEQ ID NO: 1434 - DNA, 122 bp, Homo sapiens
  misc_feature (61)..(62): /note="This region represents a CpG dinucleotide"
  misc_feature (61)..(61): /note="Nucleotide may be methylated to form 5-methylcytosine"
ctcagcaggcttgaacccaaactgggccttgaacattcccaagcactgagaaaggtatttcggttgttgctcaaaacactgaaactggcccccagccctgagccaaatttctcaaactgtca

SEQ ID NO: 1435 - DNA, 122 bp, Homo sapiens
  misc_feature (61)..(62): /note="This region represents a CpG dinucleotide"
  misc_feature (61)..(61): /note="Nucleotide may be methylated to form 5-methylcytosine"
ggctgctatcgttttagcacttcccttcaaagtactatccaacagggccccaaatagtatcgcaaatagcagctcctgtaaatattcaggagggtgtactgcgcacaagttgcagaggggag

SEQ ID NO: 1436 - DNA, 122 bp, Homo sapiens
  misc_feature (61)..(62): /note="This region represents a CpG dinucleotide"
  misc_feature (61)..(61): /note="Nucleotide may be methylated to form 5-methylcytosine"
gttccctatctactcagagttctccccctcacgtgcctatccccaaccctgcagtgtctgcggaccaaaggggaagggagcctcaggccaacccccaaggtacagccagaccagctcatcca

SEQ ID NO: 1437 - DNA, 122 bp, Homo sapiens
  misc_feature (61)..(62): /note="This region represents a CpG dinucleotide"
  misc_feature (61)..(61): /note="Nucleotide may be methylated to form 5-methylcytosine"
cgcgccgcagggccgggcggaaagtttttcctgacggagttttggctgcggcagcggcggcggcggccggagcgggccatggacgcgctcaagtcggcggggcgggcgctgatccggagccc

SEQ ID NO: 1438 - DNA, 122 bp, Homo sapiens
  misc_feature (61)..(62): /note="This region represents a CpG dinucleotide"
  misc_feature (61)..(61): /note="Nucleotide may be methylated to form 5-methylcytosine"
ccccctccgttctctctgggctcctccatcctgtgtcttctggcatcgctcacagacccacgccccatcctgctcagccaccttgactcgctgggggaccacaagatgaacacagctctgac

SEQ ID NO: 1439 - DNA, 122 bp, Homo sapiens
  misc_feature (61)..(62): /note="This region represents a CpG dinucleotide"
  misc_feature (61)..(61): /note="Nucleotide may be methylated to form 5-methylcytosine"
tgaaaaggggaattaatttgacccagaaaggcttactcagagaggcatccaccagtcctacgctgttgtcagactaacaaaaacagtgtggaagaacaagagttagggtaagaatgatctaa

SEQ ID NO: 1440 - DNA, 122 bp, Homo sapiens
  misc_feature (61)..(62): /note="This region represents a CpG dinucleotide"
  misc_feature (61)..(61): /note="Nucleotide may be methylated to form 5-methylcytosine"
gacgcttggcagtgtccatctccgccactccggattcgggatctgaaccggactccctttcgattggctgagggcaacagaggccatcgcctgtccattcagaatggcgctcacctatttct

SEQ ID NO: 1441 - DNA, 122 bp, Homo sapiens
  misc_feature (61)..(62): /note="This region represents a CpG dinucleotide"
  misc_feature (61)..(61): /note="Nucleotide may be methylated to form 5-methylcytosine"
agatgccgttaccagtgagatatcatcacacacgcacggaacggctacagctagaaagaccgacaatgctggaacactcataaatcatggatgagacgcaaggggacacagccactctggaa

SEQ ID NO: 1442 - DNA, 122 bp, Homo sapiens
  misc_feature (61)..(62): /note="This region represents a CpG dinucleotide"
  misc_feature (61)..(61): /note="Nucleotide may be methylated to form 5-methylcytosine"
gatttacctggttaattttatgtgtcaatttggctgagccacagtgagtgaagagatattcggtcaacattattctggatgtctctatgagggtgttttaggatgagatttacatatatatt

SEQ ID NO: 1443 - DNA, 122 bp, Homo sapiens
  misc_feature (61)..(62): /note="This region represents a CpG dinucleotide"
  misc_feature (61)..(61): /note="Nucleotide may be methylated to form 5-methylcytosine"
ttatctggccccacccacacatcctgctgattggttcattttacagagagctgattgggccgttttacagagcgttcatttgtctgttttgacattgtgctgactggcgtgtttacaaacct

SEQ ID NO: 1444 - DNA, 122 bp, Homo sapiens
  misc_feature (61)..(62): /note="This region represents a CpG dinucleotide"
  misc_feature (61)..(61): /note="Nucleotide may be methylated to form 5-methylcytosine"
gaaatatttaggaggtagggctttgaatccagactgcctgggttccaatcctagctccatcgcttttaagctgtgtgacttcaggcaaattactcaccttcttttgcttcaatttcctcatc

SEQ ID NO: 1445 - DNA, 122 bp, Homo sapiens
  misc_feature (61)..(62): /note="This region represents a CpG dinucleotide"
  misc_feature (61)..(61): /note="Nucleotide may be methylated to form 5-methylcytosine"
tggagtgcagtggcacgatcatggctcactgtggtcttgacctcctgtgctgaagtgatccgtctacctcagcctcctgagtagctgggacaacaagtgtatgccactgcacacggctaatt

SEQ ID NO: 1446 - DNA, 122 bp, Homo sapiens
  misc_feature (61)..(62): /note="This region represents a CpG dinucleotide"
  misc_feature (61)..(61): /note="Nucleotide may be methylated to form 5-methylcytosine"
ctgcatggatgcctgccagtgaggcagtgacagccctgggaggctggtcaccgagatgcccgcccctgctccctctggtggtggccgtgtacaccatatgcccctcaagccaggaaggcaag

SEQ ID NO: 1447 - DNA, 122 bp, Homo sapiens
  misc_feature (61)..(62): /note="This region represents a CpG dinucleotide"
  misc_feature (61)..(61): /note="Nucleotide may be methylated to form 5-methylcytosine"
atgataacatatcaaaacccaaatctcagtggcttaaaacatcaaggtttatttcctactcgtgctacatgttcatgtggaggagagggagctctgctccacagaatcactcaggaatccag

SEQ ID NO: 1448 - DNA, 122 bp, Homo sapiens
  misc_feature (61)..(62): /note="This region represents a CpG dinucleotide"
  misc_feature (61)..(61): /note="Nucleotide may be methylated to form 5-methylcytosine"
aggccatgatcaagaccgctaagatgcaggggaacgtgatggtgagtgccacggacagggcgcgcgctgggtcggggggacccaccgtgaggagcgatgctgggggaggtctgtccttctca

SEQ ID NO: 1449 - DNA, 122 bp, Homo sapiens
  misc_feature (61)..(62): /note="This region represents a CpG dinucleotide"
  misc_feature (61)..(61): /note="Nucleotide may be methylated to form 5-methylcytosine"
gctaagtgagagactttcagcagctcacatccccaccatggaattatgcaaatctgaccacgctggatcctcccaacccctgggaataacaaagggagctgctgggagactgtgacacagaa

SEQ ID NO: 1450 - DNA, 122 bp, Homo sapiens
  misc_feature (61)..(62): /note="This region represents a CpG dinucleotide"
  misc_feature (61)..(61): /note="Nucleotide may be methylated to form 5-methylcytosine"
aacagttggacaaacaaagcagtttctattttgtaagtataaataaattcccccccaccccgctgcgtctcttcgttggatttaaaaagaaaggtatttttgcacagacacaaagctagaga

SEQ ID NO: 1451 - DNA, 122 bp, Homo sapiens
  misc_feature (61)..(62): /note="This region represents a CpG dinucleotide"
  misc_feature (61)..(61): /note="Nucleotide may be methylated to form 5-methylcytosine"
tttaagagaaaaggaggacaggagagctcaggaccagagatcacaagcttccacagataccgtagaaaggtatagtgcacccacctttctaaacaagtgaaatatgttgcctgttaaataaa

SEQ ID NO: 1452 - DNA, 122 bp, Homo sapiens
  misc_feature (61)..(62): /note="This region represents a CpG dinucleotide"
  misc_feature (61)..(61): /note="Nucleotide may be methylated to form 5-methylcytosine"
ccaaggcaggccaagagtggtggctcatgcctgtaatcccagcactttgggagactaagacgggaatattgcttaaggccaggagttcgataccagcctgggtaacactatgagaccctgtc

SEQ ID NO: 1453 - DNA, 122 bp, Homo sapiens
  misc_feature (61)..(62): /note="This region represents a CpG dinucleotide"
  misc_feature (61)..(61): /note="Nucleotide may be methylated to form 5-methylcytosine"
ccaaaaaccgccgctttcaaatcgccaatcaaattcttccttggcttcgagtctctcagccggccgcgctctccgatgcccagccctcctggaaccacctcgcctgtgacgtaggtggagcg

SEQ ID NO: 1454 - DNA, 122 bp, Homo sapiens
  misc_feature (61)..(62): /note="This region represents a CpG dinucleotide"
  misc_feature (61)..(61): /note="Nucleotide may be methylated to form 5-methylcytosine"
tccagctggaattggtagagccaagttcagagacaagtgaattgtgcaaagaaagagttacggagatctacagaggtggccccttgagtcattggctgaatattaatctgtacattcatagg

SEQ ID NO: 1455 - DNA, 122 bp, Homo sapiens
  misc_feature (61)..(62): /note="This region represents a CpG dinucleotide"
  misc_feature (61)..(61): /note="Nucleotide may be methylated to form 5-methylcytosine"
ccaactgcagcatcttccgcttttgttgtctgagcgcggccgcgggacaagggatgctggcgggcggcaggggcgagcgccgcgggcgagaggcggctcccgacgcgagtgcgcagcgcccg

SEQ ID NO: 1456 - DNA, 122 bp, Homo sapiens
  misc_feature (61)..(62): /note="This region represents a CpG dinucleotide"
  misc_feature (61)..(61): /note="Nucleotide may be methylated to form 5-methylcytosine"
ctgactccgccccgcatctggccagacccgcctcgcgtcagagctgacccactcactgcgcgtttgccagtcagtctctccggacctgcctcgagcctcaggctgctgaaatcaccgcgcct

SEQ ID NO: 1457 - DNA, 122 bp, Homo sapiens
  misc_feature (61)..(62): /note="This region represents a CpG dinucleotide"
  misc_feature (61)..(61): /note="Nucleotide may be methylated to form 5-methylcytosine"
cagcgactggaatctcctccacgcagtcatgtctgcagatactccacacgcacgcgacaccgatggctcctccgaggaaggcagggctatgagcggagccaaataatcacccgagggcaagg

SEQ ID NO: 1458 - DNA, 122 bp, Homo sapiens
  misc_feature (61)..(62): /note="This region represents a CpG dinucleotide"
  misc_feature (61)..(61): /note="Nucleotide may be methylated to form 5-methylcytosine"
tttcctttgattggcttatttcacttaatataatgtcctcaagcttcatcaatgttttagcgtgtgtcagaatttccttcctttttaatggtgaataatatttccttgtatgaatataccat

SEQ ID NO: 1459 - DNA, 122 bp, Homo sapiens
  misc_feature (61)..(62): /note="This region represents a CpG dinucleotide"
  misc_feature (61)..(61): /note="Nucleotide may be methylated to form 5-methylcytosine"
cttctacaactcggtgtctgaggggttttgtctgcggctcgtcctgctacactgaccacacgtacccaaggtgctcagagcccagtttggttttatacattttagggagacatgagacatcc

SEQ ID NO: 1460 - DNA, 122 bp, Homo sapiens
  misc_feature (61)..(62): /note="This region represents a CpG dinucleotide"
  misc_feature (61)..(61): /note="Nucleotide may be methylated to form 5-methylcytosine"
tggggcacagaactccatgcaggtcctcaaggggaagcaccagggcagtcaggaggcagacggagtgggaggaaagcatgggcaagaggcattattgtggtttctgcaagaaagaatgggtg

SEQ ID NO: 1461 - DNA, 122 bp, Homo sapiens
  misc_feature (61)..(62): /note="This region represents a CpG dinucleotide"
  misc_feature (61)..(61): /note="Nucleotide may be methylated to form 5-methylcytosine"
tcccagggggcgctgcgcgctcgccggcaccgcgactaaagcttgcaaagcctgggtcatcgaaactacaactcccagaaggctaagcgtctgcacacgctaggtccgcagggcgctgaccc

SEQ ID NO: 1462 - DNA, 122 bp, Homo sapiens
  misc_feature (61)..(62): /note="This region represents a CpG dinucleotide"
  misc_feature (61)..(61): /note="Nucleotide may be methylated to form 5-methylcytosine"
tcagtgtgtcaatgtatcctgcattgcacattaattcccacagctagctgcattcttcatcgacacacaagccaagcaatccaccactaagagtcataaaaagcactttgaacaacacagaa

SEQ ID NO: 1463 - DNA, 122 bp, Homo sapiens
  misc_feature (61)..(62): /note="This region represents a CpG dinucleotide"
  misc_feature (61)..(61): /note="Nucleotide may be methylated to form 5-methylcytosine"
ggttgagctctgaaatcggacgattctgtgtttcctgccgcatggagggcgtgtgtggttcgcaggctgtggggggcttcttgcagcgggggctgctgcctaaacagactccgcgggcccca

SEQ ID NO: 1464 - DNA, 122 bp, Homo sapiens
  misc_feature (61)..(62): /note="This region represents a CpG dinucleotide"
  misc_feature (61)..(61): /note="Nucleotide may be methylated to form 5-methylcytosine"
ctccctaaatggaatggggattccgctgacgttcttcagaagctctgcgctgcgggcctccgtgtcccttctactcccgctgtctgaaccccgcgatgtcccccgcgctgttcgtcccctct

SEQ ID NO: 1465 - DNA, 122 bp, Homo sapiens
  misc_feature (61)..(62): /note="This region represents a CpG dinucleotide"
  misc_feature (61)..(61): /note="Nucleotide may be methylated to form 5-methylcytosine"
gagaaatagatgtacattacctttttgcttcaggcatttttattaagaaaaattctcttccgatggctcaagtaaaacaagcattgatatcttgtgcaaaatgggcatttaataaatttatc

SEQ ID NO: 1466 - DNA, 122 bp, Homo sapiens
  misc_feature (61)..(62): /note="This region represents a CpG dinucleotide"
  misc_feature (61)..(61): /note="Nucleotide may be methylated to form 5-methylcytosine"
aaagggccagagtcatagagattccaccttcatgaatgctgaatttgccaagaatgatatcggacagagaggagaagaggaagaagtaagccagacattcaagttatcagtcagttaataac

SEQ ID NO: 1467 - DNA, 122 bp, Homo sapiens
  misc_feature (61)..(62): /note="This region represents a CpG dinucleotide"
  misc_feature (61)..(61): /note="Nucleotide may be methylated to form 5-methylcytosine"
ggcagggcacaaggggttgatctcagcccacaagccccaggggcagcccaggaaagcaggcgacggatgtggatcctgacctcctgagaggtgtgaggtgcagggatacccacctctgcctt

SEQ ID NO: 1468 - DNA, 122 bp, Homo sapiens
  misc_feature (61)..(62): /note="This region represents a CpG dinucleotide"
  misc_feature (61)..(61): /note="Nucleotide may be methylated to form 5-methylcytosine"
ctctacaaaaatttaaaaattagtcagatgtggtggcgtgcacctgtgctcccagcttctcgggaggctgaagtgggaggatggcttgagcctgggaggtagaggctgaagctaaatgtgtt

SEQ ID NO: 1469 - DNA, 122 bp, Homo sapiens
  misc_feature (61)..(62): /note="This region represents a CpG dinucleotide"
  misc_feature (61)..(61): /note="Nucleotide may be methylated to form 5-methylcytosine"
gtgccagccgcaatagggcggccgtgggtgcaaacggaggggagcgccggcagctagcaccgcgcggcgactaacgggccgccccggagactcctgggagctcaggcccacgcgcgagtgcg

SEQ ID NO: 1470 - DNA, 122 bp, Homo sapiens
  misc_feature (61)..(62): /note="This region represents a CpG dinucleotide"
  misc_feature (61)..(61): /note="Nucleotide may be methylated to form 5-methylcytosine"
tttggattagtccagacattctgaaactgtggtggaggaggatgattaaaaaccaaaggacgtggctgcacatgataagcacctttttgaaaagcaaaaagaaaaggcctatttttagttct

SEQ ID NO: 1471 - DNA, 122 bp, Homo sapiens
  misc_feature (61)..(62): /note="This region represents a CpG dinucleotide"
  misc_feature (61)..(61): /note="Nucleotide may be methylated to form 5-methylcytosine"
ggtttttatgggctcagaagggagggcatgtgtgctgattggtccatgggcggccacaggcgggcctggaaaaagcaccatccgattatccgaaaggcatcaaggaagttctcactcccagt

SEQ ID NO: 1472 - DNA, 122 bp, Homo sapiens
  misc_feature (61)..(62): /note="This region represents a CpG dinucleotide"
  misc_feature (61)..(61): /note="Nucleotide may be methylated to form 5-methylcytosine"
tctcagaaggtcccggcgcaaagacggtgccaccaggcacggccaccggatccccgctcccgctggctcgcgcctcgggggaagctcagactcctaaactcgcactctccgtgctttgcgcc

SEQ ID NO: 1473 - DNA, 122 bp, Homo sapiens
  misc_feature (61)..(62): /note="This region represents a CpG dinucleotide"
  misc_feature (61)..(61): /note="Nucleotide may be methylated to form 5-methylcytosine"
agctgttgagaccataaatgtcaaaggtatcctgacaaactggagctgccccgtggtagacgtaacgatatggctcccatgactggaggaacaccagggtccttagtctcgcgccagtttga

SEQ ID NO: 1474 - DNA, 122 bp, Homo sapiens
  misc_feature (61)..(62): /note="This region represents a CpG dinucleotide"
  misc_feature (61)..(61): /note="Nucleotide may be methylated to form 5-methylcytosine"
ttttgtttctaatgtggacgatcatttaaaatgcctctggtggccgggcgcggtgactgacgcctgtaatcacagcactttgggaggccgaggcgggcggatcacctgaggtcaggaattcg

SEQ ID NO: 1475 - DNA, 122 bp, Homo sapiens
  misc_feature (61)..(62): /note="This region represents a CpG dinucleotide"
  misc_feature (61)..(61): /note="Nucleotide may be methylated to form 5-methylcytosine"
aagaggcgtctgcgtgaagatcaatcatttcccggaggacacggactacgaccacgacagcgcggagtatctactccgtacgtgggggtccgggacagacgtggggagtgggtcaaatcgcg

SEQ ID NO: 1476 - DNA, 122 bp, Homo sapiens
  misc_feature (61)..(62): /note="This region represents a CpG dinucleotide"
  misc_feature (61)..(61): /note="Nucleotide may be methylated to form 5-methylcytosine"
ctttaaactcaagcggctgaagtgctcccggctgaggaggatgctgttctgtgcaaacgccgagccattgatcatgttccgggttgtccaactcttcagtttgagacaaaaacaaacacgct

SEQ ID NO: 1477 - DNA, 122 bp, Homo sapiens
  misc_feature (61)..(62): /note="This region represents a CpG dinucleotide"
  misc_feature (61)..(61): /note="Nucleotide may be methylated to form 5-methylcytosine"
aagtaagaaaaactcacatttgtatttcttccccttagccacacagagctgggtagaagacggcttctcttcaaagtatcgttccttcatctagcatagttgctatggccataataagtcaa

SEQ ID NO: 1478 - DNA, 122 bp, Homo sapiens
  misc_feature (61)..(62): /note="This region represents a CpG dinucleotide"
  misc_feature (61)..(61): /note="Nucleotide may be methylated to form 5-methylcytosine"
aaaaaaaaaaaaaaaaaaaagatgcttatgatccggcggatcctcctgggttggccaggccggggagagggcgcgggcgccgagtggcgggggcagcgggcgggcgcggcgaccggggccgg

SEQ ID NO: 1479 - DNA, 122 bp, Homo sapiens
  misc_feature (61)..(62): /note="This region represents a CpG dinucleotide"
  misc_feature (61)..(61): /note="Nucleotide may be methylated to form 5-methylcytosine"
gccgccgccgctctgaattattgatgcagccggcgctgcagccggagcgggcggagagcgcgcgccgggcacaaaggcgcggacctcggcctggccccgcccccgccgcctcccggcccgcc

SEQ ID NO: 1480 - DNA, 122 bp, Homo sapiens
  misc_feature (61)..(62): /note="This region represents a CpG dinucleotide"
  misc_feature (61)..(61): /note="Nucleotide may be methylated to form 5-methylcytosine"
atttttaaaaattaattttatgcttataaacttctctgccattttgcaatcttctatttacgtatttgttttctagatgactaacatggctttttcacaatcaagttcataacgcagctgaa

SEQ ID NO: 1481 - DNA, 122 bp, Homo sapiens
  misc_feature (61)..(62): /note="This region represents a CpG dinucleotide"
  misc_feature (61)..(61): /note="Nucleotide may be methylated to form 5-methylcytosine"
atgtcttaaatgtatttaattgaagtctcacgtctccctaaaatgtatacatctaggtgacgccccaatcaccttggggtcatgttctcaggatctcctgaaggttatgtcatgggccatta

SEQ ID NO: 1482 - DNA, 122 bp, Homo sapiens
  misc_feature (61)..(62): /note="This region represents a CpG dinucleotide"
  misc_feature (61)..(61): /note="Nucleotide may be methylated to form 5-methylcytosine"
gctcccgcagctcctctggtacccgccctcgtacctggcgcatctgggcctcggcggcgccgccctcctgccttcgcagctgctcccggaagcgcgcaacctgctccagcagcgcgtccact

SEQ ID NO: 1483 - DNA, 122 bp, Homo sapiens
  misc_feature (61)..(62): /note="This region represents a CpG dinucleotide"
  misc_feature (61)..(61): /note="Nucleotide may be methylated to form 5-methylcytosine"
tcaaatctcagcccttggcgccgcgtggctctccgcccctctgggccgccagggtagcgccgcccgccgctcgcccccggctagcacagcaaatcgcagtcccctcgccccgggagagactc

SEQ ID NO: 1484 - DNA, 122 bp, Homo sapiens
  misc_feature (61)..(62): /note="This region represents a CpG dinucleotide"
  misc_feature (61)..(61): /note="Nucleotide may be methylated to form 5-methylcytosine"
tgaaccctgactgatataacttgttattaagaaacaggaagataaaaactaattgagcatcgaagtgcttttacttctaggaagagagaattaggggttggtaccggactatagcttttgtt

SEQ ID NO: 1485 - DNA, 122 bp, Homo sapiens
  misc_feature (61)..(62): /note="This region represents a CpG dinucleotide"
  misc_feature (61)..(61): /note="Nucleotide may be methylated to form 5-methylcytosine"
ctacttgggacattgaggcaggaggattgcttgagtccaggagttcgagactagcctgggcgacacagtgagacccatctctttgaagaaagtttaaaaaatgaataaagttgtttctaaga

SEQ ID NO: 1486 - DNA, 122 bp, Homo sapiens
  misc_feature (61)..(62): /note="This region represents a CpG dinucleotide"
  misc_feature (61)..(61): /note="Nucleotide may be methylated to form 5-methylcytosine"
gtgaatggcgagcgagtgagccaagcttcatctgtgtttacagccgctccccttcactcacgtgactgcctgagctccgtatcctgtcagaccatcagcagcattaggttctccgaggagcc

SEQ ID NO: 1487 - DNA, 122 bp, Homo sapiens
  misc_feature (61)..(62): /note="This region represents a CpG dinucleotide"
  misc_feature (61)..(61): /note="Nucleotide may be methylated to form 5-methylcytosine"
ccgggaccaacaccgagatggacaccctgctggtgtctaggtaggagttggagtgcgtcccggtctccgccaacccagtgctgtttttactgtgcgaagttaacgtgggcgagatcctagcg

SEQ ID NO: 1488 - DNA, 122 bp, Homo sapiens
  misc_feature (61)..(62): /note="This region represents a CpG dinucleotide"
  misc_feature (61)..(61): /note="Nucleotide may be methylated to form 5-methylcytosine"
ctgattttttggggggcggggacagggtcttgctctgttccccaggctgcagtggagtggcgcgatcatggctcactgcagccttgctccctggctcaagcaatcctcctaccttagcctcc

SEQ ID NO: 1489 - DNA, 122 bp, Homo sapiens
  misc_feature (61)..(62): /note="This region represents a CpG dinucleotide"
  misc_feature (61)..(61): /note="Nucleotide may be methylated to form 5-methylcytosine"
tagtattcaattgtgaatatataccacatttttcatccatctttctgttgatgaacatttcgggtgatccatattttggctattgtgaatagtgctacagtaaacatgagagtgcagagatc

SEQ ID NO: 1490 - DNA, 122 bp, Homo sapiens
  misc_feature (61)..(62): /note="This region represents a CpG dinucleotide"
  misc_feature (61)..(61): /note="Nucleotide may be methylated to form 5-methylcytosine"
tctttggcattggggtggaagtttcatcttccaactacttcctgctgactgtgggtgtaacgctgactctacctatggtttttggtctgtcaagagaccctgtgagtcattgtcctggattg

SEQ ID NO: 1491 - DNA, 122 bp, Homo sapiens
  misc_feature (61)..(62): /note="This region represents a CpG dinucleotide"
  misc_feature (61)..(61): /note="Nucleotide may be methylated to form 5-methylcytosine"
gtaggctggaccaggaaggagacctggttcgtttcgcccaggctgtcacggcttcaagagcgcctctccgctatttccgtcgctcgacagacgggctgagctctttggagtgatgttgggtt

SEQ ID NO: 1492 - DNA, 122 bp, Homo sapiens
  misc_feature (61)..(62): /note="This region represents a CpG dinucleotide"
  misc_feature (61)..(61): /note="Nucleotide may be methylated to form 5-methylcytosine"
cgaatgtctaaatatatctacatagagatataaccatgtgagcatgtataaaaatatatacgtgtgcgtgtataagtgtgtttgtaatttaaatgaaagtttgtaaatgtgtccttaaggtc

SEQ ID NO: 1493 - DNA, 122 bp, Homo sapiens
  misc_feature (61)..(62): /note="This region represents a CpG dinucleotide"
  misc_feature (61)..(61): /note="Nucleotide may be methylated to form 5-methylcytosine"
cacccaggctggagtgcagtggcaagatgactactcactgccacctccaacttctaggctcgagagatcctcttgccacctcccaaatagctgggactacaggggtgcaccactgtacctgg

SEQ ID NO: 1494 - DNA, 122 bp, Homo sapiens
  misc_feature (61)..(62): /note="This region represents a CpG dinucleotide"
  misc_feature (61)..(61): /note="Nucleotide may be methylated to form 5-methylcytosine"
gcatgacatagcctgctatcttgttgtggagcttctcgctggggataatggcgatctcctcgcacacgcgcttatccgtgtggaagtcattgcccaggcgcgtgtagtacttttctgtgacg

SEQ ID NO: 1495 - DNA, 122 bp, Homo sapiens
  misc_feature (61)..(62): /note="This region represents a CpG dinucleotide"
  misc_feature (61)..(61): /note="Nucleotide may be methylated to form 5-methylcytosine"
aatgcatcctccccaggcccataaaggagaaacaaggcagcagcgtggctcaggtccctgcggtagcccacctcctgcaagatccagagtcaccatggaaggacatctcctggagggctgag

SEQ ID NO: 1496 - DNA, 122 bp, Homo sapiens
  misc_feature (61)..(62): /note="This region represents a CpG dinucleotide"
  misc_feature (61)..(61): /note="Nucleotide may be methylated to form 5-methylcytosine"
agccctgacattgctgcgctcggggggctccaggcagcccgtatcggggcctttatttctcgtcggcggcgccctgcaccgcgcctcgcaaagtaagtcccgtctccctcacctctgctccg

SEQ ID NO: 1497 - DNA, 122 bp, Homo sapiens
  misc_feature (61)..(62): /note="This region represents a CpG dinucleotide"
  misc_feature (61)..(61): /note="Nucleotide may be methylated to form 5-methylcytosine"
aggtgccctggcagattcgagcggccacccccagccgctgagccgagcttctgctgccgccgctgccgctgcgctcccagccgctgcctgcgccctccctgccgccccctcgggtgcgggct

SEQ ID NO: 1498 - DNA, 122 bp, Homo sapiens
  misc_feature (61)..(62): /note="This region represents a CpG dinucleotide"
  misc_feature (61)..(61): /note="Nucleotide may be methylated to form 5-methylcytosine"
ggggatcccccccaactgaaggttcctccactgtttagaccatatagggtaacttctggacgttgccatggcatttgtaaactgcctggcgctgctaggagtgtctttagcatactaatgca

SEQ ID NO: 1499 - DNA, 122 bp, Homo sapiens
  misc_feature (61)..(62): /note="This region represents a CpG dinucleotide"
  misc_feature (61)..(61): /note="Nucleotide may be methylated to form 5-methylcytosine"
gacatacctgtgagcatgtgcccatgtgcacgtgtgaggccatggctacacctgagtgggcgcatgctgtgcgtgttagtgcattcacattcctgttcattgtcatgcagatatttgtcagg

SEQ ID NO: 1500 - DNA, 122 bp, Homo sapiens
  misc_feature (61)..(62): /note="This region represents a CpG dinucleotide"
  misc_feature (61)..(61): /note="Nucleotide may be methylated to form 5-methylcytosine"
agagttcacataaaagtggatttccagcttctcttgaaaaatctggccacatctggccggcgtgtgtccagcaacaatgagcctgagttgggtagcggccgccccctcttggcggcatggat

SEQ ID NO: 1501 - DNA, 122 bp, Homo sapiens
  misc_feature (61)..(62): /note="This region represents a CpG dinucleotide"
  misc_feature (61)..(61): /note="Nucleotide may be methylated to form 5-methylcytosine"
ttggggaaaccacaaatatgaaacaaatctttcgcttccgggaaaatggcgactcccgctcgtgccccggagtcaccgccgtccgaggtcatccggcgctagtagcggagcctgccgaggaa

SEQ ID NO: 1502 - DNA, 122 bp, Homo sapiens
  misc_feature (61)..(62): /note="This region represents a CpG dinucleotide"
  misc_feature (61)..(61): /note="Nucleotide may be methylated to form 5-methylcytosine"
ccattttggacataacatacaacataatacatgtaacacgcacagaaacacatagaaacacgtatccatacacacaaagatcaaatagatgttaccgtgaaactctagccatgacatggcat

SEQ ID NO: 1503 - DNA, 122 bp, Homo sapiens
  misc_feature (61)..(62): /note="This region represents a CpG dinucleotide"
  misc_feature (61)..(61): /note="Nucleotide may be methylated to form 5-methylcytosine"
cctgagacctcagcactgattagtagccctggaggcaaaagtagatgtggagctgagcctcgaaaccccatacaccttgtgcctacagcttggggtgggtggggactgggattttgtcctca

SEQ ID NO: 1504 - DNA, 122 bp, Homo sapiens
  misc_feature (61)..(62): /note="This region represents a CpG dinucleotide"
  misc_feature (61)..(61): /note="Nucleotide may be methylated to form 5-methylcytosine"
caaggcgagtatgtttaccctgctgggcacccttccgctccgcggggaccactgcgggatcgcgctctctaaaactcctctcaactgccccgcagtgcgcggcggccttttccgccaggttt

SEQ ID NO: 1505 - DNA, 122 bp, Homo sapiens
  misc_feature (61)..(62): /note="This region represents a CpG dinucleotide"
  misc_feature (61)..(61): /note="Nucleotide may be methylated to form 5-methylcytosine"
caaatctatatgaaggatcgaattgcattgaactagcaaacacacacacacacacgcacacgcaaaaactgatgaaagctgaacaaggtctgtagtctagtcaacagtactgcactatgtga

SEQ ID NO: 1506 - DNA, 122 bp, Homo sapiens
  misc_feature (61)..(62): /note="This region represents a CpG dinucleotide"
  misc_feature (61)..(61): /note="Nucleotide may be methylated to form 5-methylcytosine"
tataatgtgctagttttaaagttgaacaaaacaacaacaacaacaaagcaacccacagcccgtgtctacggccataccaccctgaacacgcctgatctcagaagctaagcaggatcggacct

SEQ ID NO: 1507 - DNA, 122 bp, Homo sapiens
  misc_feature (61)..(62): /note="This region represents a CpG dinucleotide"
  misc_feature (61)..(61): /note="Nucleotide may be methylated to form 5-methylcytosine"
aatgtctttataccactgaaggggtgtattgaattccatatcataaacagaaatacattccgtgcttaagtatttggtcttgtttttagggggtcagttaagcacacaaccaccacctacac

SEQ ID NO: 1508 - DNA, 122 bp, Homo sapiens
  misc_feature (61)..(62): /note="This region represents a CpG dinucleotide"
  misc_feature (61)..(61): /note="Nucleotide may be methylated to form 5-methylcytosine"
tagagaggacccagcacaccccaaggtcagtgtggagaaagggacatttcccggttccttcgcctctgcccagggttctgcgggcatggcccacccccccaggggcaggggaggaggtggct

SEQ ID NO: 1509 - DNA, 122 bp, Homo sapiens
  misc_feature (61)..(62): /note="This region represents a CpG dinucleotide"
  misc_feature (61)..(61): /note="Nucleotide may be methylated to form 5-methylcytosine"
gcaggcgccaggctacgcggctgctgcggccctgggccatcaccatcacccgggccacgtcggctcctattccagcgcagccttcaactccacgcgggactttctgttccgcaaccggggtt

SEQ ID NO: 1510 - DNA, 122 bp, Homo sapiens
  misc_feature (61)..(62): /note="This region represents a CpG dinucleotide"
  misc_feature (61)..(61): /note="Nucleotide may be methylated to form 5-methylcytosine"
ataaccttttaaaatacagcatcattaagtgggaaactgaaagcctgccattgttgttgccgtttaacagctgatacaggtttctggtgatgctactgttgcctagctaccctgaccacatt

SEQ ID NO: 1511 - DNA, 122 bp, Homo sapiens
  misc_feature (61)..(62): /note="This region represents a CpG dinucleotide"
  misc_feature (61)..(61): /note="Nucleotide may be methylated to form 5-methylcytosine"
cacacatgagctgaagagcctagtcttctccccctgcatgaattcctggtggctacaccccgttctcccagtgtgcaggcaggcccttagtctgagccactccacattatttcccttactgt

SEQ ID NO: 1512 - DNA, 122 bp, Homo sapiens
  misc_feature (61)..(62): /note="This region represents a CpG dinucleotide"
  misc_feature (61)..(61): /note="Nucleotide may be methylated to form 5-methylcytosine"
tagctgggattacaggtgtgcaccaccacgcccagacattgttgtatttcttgtagagaccgggttttgccatgttggccaggctgttctcgaattcctgacctcaagtgatccgccgacct

SEQ ID NO: 1513 - DNA, 122 bp, Homo sapiens
  misc_feature (61)..(62): /note="This region represents a CpG dinucleotide"
  misc_feature (61)..(61): /note="Nucleotide may be methylated to form 5-methylcytosine"
ctgttgtttcgaggggagtgaggcccggggctgagttaagtttcactggtgagtggccggcgggcacaaaggaaggaaccgctgggggaggggaggccgcagagctggagggctgggacaaa

SEQ ID NO: 1514 - DNA, 122 bp, Homo sapiens
  misc_feature (61)..(62): /note="This region represents a CpG dinucleotide"
  misc_feature (61)..(61): /note="Nucleotide may be methylated to form 5-methylcytosine"
cctcccgcagctcattgcagccccgaggaaatcaccgggggagggctcgggagtgcggcgcggcagccccataatttccagggcccttctcctacactgacacgtaattgtcagattgtttt

SEQ ID NO: 1515 - DNA, 122 bp, Homo sapiens
  misc_feature (61)..(62): /note="This region represents a CpG dinucleotide"
  misc_feature (61)..(61): /note="Nucleotide may be methylated to form 5-methylcytosine"
ggagtctgatttacatagggcatgaagattggtcagaccaggtgtgctatttgcatagcacgtgaagaactggttaggactaggtgtaccttttgcatagtgcatgaagaagctggctgccc

SEQ ID NO: 1516 - DNA, 122 bp, Homo sapiens
  misc_feature (61)..(62): /note="This region represents a CpG dinucleotide"
  misc_feature (61)..(61): /note="Nucleotide may be methylated to form 5-methylcytosine"
gcacgcgcgcttcttaaaggagacggctcataaaggattccccactacggtagggcgcaccggaggtatccagcccgcgacaagggccctggtttgagcacagctcttcgacagtatctccc

SEQ ID NO: 1517 - DNA, 122 bp, Homo sapiens
  misc_feature (61)..(62): /note="This region represents a CpG dinucleotide"
  misc_feature (61)..(61): /note="Nucleotide may be methylated to form 5-methylcytosine"
cacaaaagcaactgaggttcttgccattgaaaataaaggccaaaaccacaattacttttgcgccaacctaaatatatagtctgaaatggaataataaatagtattaaataattaatagtacc

SEQ ID NO: 1518 - DNA, 122 bp, Homo sapiens
  misc_feature (61)..(62): /note="This region represents a CpG dinucleotide"
  misc_feature (61)..(61): /note="Nucleotide may be methylated to form 5-methylcytosine"
cacacgtgcattttacacacaccatatatttatatgaatgcatatgtgtatttgtgtaagcgtgatcttgtgtatgtgtgtgtgtttaacctgagaaatgaatatactgaaactatggagtc

SEQ ID NO: 1519 - DNA, 122 bp, Homo sapiens
  misc_feature (61)..(62): /note="This region represents a CpG dinucleotide"
  misc_feature (61)..(61): /note="Nucleotide may be methylated to form 5-methylcytosine"
cagaaaaaggaagttgtagccacttgaggtcacgttcatgaaacagaatcaaacctgcgtcgttccgggatgccccaggcctcaccaagcagtggatgtggaagaagcaggggaagatgctc

SEQ ID NO: 1520 - DNA, 122 bp, Homo sapiens
  misc_feature (61)..(62): /note="This region represents a CpG dinucleotide"
  misc_feature (61)..(61): /note="Nucleotide may be methylated to form 5-methylcytosine"
gagtatatccagttatagattatagaggcataatcactaactttgtcagacattatcttacgcgtaggaaaaggcaagaactagggtcatttatcttttaagatatatagtaactcaggcaa

SEQ ID NO: 1521 - DNA, 122 bp, Homo sapiens
  misc_feature (61)..(62): /note="This region represents a CpG dinucleotide"
  misc_feature (61)..(61): /note="Nucleotide may be methylated to form 5-methylcytosine"
caatttaagattttggcttaagatttttttgggcggtttctctttccagccagcgccgagcgatgggcatctctcgggacaactggcaccagcgccgcaaaaccgggggcaagagaaagccc

SEQ ID NO: 1522 - DNA, 122 bp, Homo sapiens
  misc_feature (61)..(62): /note="This region represents a CpG dinucleotide"
  misc_feature (61)..(61): /note="Nucleotide may be methylated to form 5-methylcytosine"
catgcgaggaggttccgcatgcgcggtggagtgagcgaagcgcacgctgaggaggatcggcggccggtgagggggaagcaagtctggtctctgtgattgaagaagtcggctctgggctccag

SEQ ID NO: 1523 - DNA, 122 bp, Homo sapiens
  misc_feature (61)..(62): /note="This region represents a CpG dinucleotide"
  misc_feature (61)..(61): /note="Nucleotide may be methylated to form 5-methylcytosine"
ttgcacaataaggaaatgcctgacaacacatttctcagaatgtatctccatcataaatggcgtaggactatatttgaaatgaatgtaaagacagaaaatctcgccaagaaaaaaaaagaaac

SEQ ID NO: 1524 - DNA, 122 bp, Homo sapiens
  misc_feature (61)..(62): /note="This region represents a CpG dinucleotide"
  misc_feature (61)..(61): /note="Nucleotide may be methylated to form 5-methylcytosine"
agccgtgggtcacggaagagaatcgtggaacccagtgattagtgttcagctcgattaggacgaacccagcacttagccgtttaggaacaatggcaagcctctagcccaatcgggagcagcaa

SEQ ID NO: 1525 - DNA, 122 bp, Homo sapiens
  misc_feature (61)..(62): /note="This region represents a CpG dinucleotide"
  misc_feature (61)..(61): /note="Nucleotide may be methylated to form 5-methylcytosine"
gctgtctgtgttgtaaacaatggtcctttgtctctggtccaggagtctcatttcttctgccggcactcatgaacctgcaatagctaacttgcctggttgcaaagaaaagaaaatctcagata

SEQ ID NO: 1526 - DNA, 122 bp, Homo sapiens
  misc_feature (61)..(62): /note="This region represents a CpG dinucleotide"
  misc_feature (61)..(61): /note="Nucleotide may be methylated to form 5-methylcytosine"
ccagacccccgcccccgccaggctaggacgagcagccgccaccgctgccaccgccaccaccgccgccgcagcgcctcagtgcggccccgcctccgccgccccaccaccttcaccacctccac

SEQ ID NO: 1527 - DNA, 122 bp, Homo sapiens
  misc_feature (61)..(62): /note="This region represents a CpG dinucleotide"
  misc_feature (61)..(61): /note="Nucleotide may be methylated to form 5-methylcytosine"
tagggacatggtaggggcagagcctccagccccacttccccaggttttgctgacagtggccggcttttagatgatggtgatcttcacctcattgttctcatcagtctggtacaaaaaaggaa

SEQ ID NO: 1528 - DNA, 122 bp, Homo sapiens
  misc_feature (61)..(62): /note="This region represents a CpG dinucleotide"
  misc_feature (61)..(61): /note="Nucleotide may be methylated to form 5-methylcytosine"
atatgcgtcctgtaattcactatgtacaataatagcaaatactgaattatacaggatacacggtggatagacaaagatcaattatgtttctatagactagcaatgactgataagaaattttc

SEQ ID NO: 1529 - DNA, 122 bp, Homo sapiens
  misc_feature (61)..(62): /note="This region represents a CpG dinucleotide"
  misc_feature (61)..(61): /note="Nucleotide may be methylated to form 5-methylcytosine"
ggaaaaaaaaaaaagcgatgagttcgccaaatatatggagcacaggaagctcagtctactcgactcctgtattttcacagaaaatgacggtgtggattctgctcctgctgtcgctctaccct

SEQ ID NO: 1530 - DNA, 122 bp, Homo sapiens
  misc_feature (61)..(62): /note="This region represents a CpG dinucleotide"
  misc_feature (61)..(61): /note="Nucleotide may be methylated to form 5-methylcytosine"
taccatcttggtttgtgtaagtgcactctgtgatgtttgcacaaagataaaatcacttagcgacacatttctcagactgtgtcctcatcattaggtgacacatgactatgtttacaggtagc

SEQ ID NO: 1531 - DNA, 122 bp, Homo sapiens
  misc_feature (61)..(62): /note="This region represents a CpG dinucleotide"
  misc_feature (61)..(61): /note="Nucleotide may be methylated to form 5-methylcytosine"
gtatgagcttacacaaacaggttatataacaagtggagtggtgcgcctgcgttccaaactcgctgagtcacgctggcctgcatatctgcctcggcctattcttgaccaaagcacatccattt

SEQ ID NO: 1532 - DNA, 122 bp, Homo sapiens
  misc_feature (61)..(62): /note="This region represents a CpG dinucleotide"
  misc_feature (61)..(61): /note="Nucleotide may be methylated to form 5-methylcytosine"
tgccactcctgccacgagtggaagcagcctgaggtcctcatcagaagcagatgctagtgtcgtatgtcttgtgcatcctgcagaaccatgagccaaataaacctcttttctttataaattac

SEQ ID NO: 1533 - DNA, 122 bp, Homo sapiens
  misc_feature (61)..(62): /note="This region represents a CpG dinucleotide"
  misc_feature (61)..(61): /note="Nucleotide may be methylated to form 5-methylcytosine"
gcgctcactgttcggagccgagctgtcagcgcttgggtgaggggcggagcgcgcggggggcggggcccagcggacagggactttgaaccgcaggttgggagggaagggtgggctcccaggct

SEQ ID NO: 1534 - DNA, 122 bp, Homo sapiens
  misc_feature (61)..(62): /note="This region represents a CpG dinucleotide"
  misc_feature (61)..(61): /note="Nucleotide may be methylated to form 5-methylcytosine"
cagacctcagggtaggttctcaggattgaaggaaggccaagcaattacaggagcacagcacgtgctgactactgtacttccagaccccctgccctcaagggactgcccagtccttgcacctc

SEQ ID NO: 1535 - DNA, 122 bp, Homo sapiens
  misc_feature (61)..(62): /note="This region represents a CpG dinucleotide"
  misc_feature (61)..(61): /note="Nucleotide may be methylated to form 5-methylcytosine"
gtgtggtctgattgcagagtgacggggcatatgattagggcattgtcgcacgccgtgtgccgggctgagggctgatgagcacaccatcgcgttggagcacagccagaccgcgcacgtgacca

SEQ ID NO: 1536 - DNA, 122 bp, Homo sapiens
  misc_feature (61)..(62): /note="This region represents a CpG dinucleotide"
  misc_feature (61)..(61): /note="Nucleotide may be methylated to form 5-methylcytosine"
aaacagtgggatcatctgtgaaacagtggaatcaccccaagaacaaactgtcagacagaccgtcctgtcgtggcatgacttgaacataaccgtcccacgtggggacgcattccgcaccggtt

SEQ ID NO: 1537 - DNA, 122 bp, Homo sapiens
  misc_feature (61)..(62): /note="This region represents a CpG dinucleotide"
  misc_feature (61)..(61): /note="Nucleotide may be methylated to form 5-methylcytosine"
gcatgatctcagctcactgcagcatcaacttcctgggctcagatgatcctcccacctcagcgcctctgtagctgggactgtgggcgttcaccacaacaccaggctaatttttttgtattttc

SEQ ID NO: 1538 - DNA, 122 bp, Homo sapiens
  misc_feature (61)..(62): /note="This region represents a CpG dinucleotide"
  misc_feature (61)..(61): /note="Nucleotide may be methylated to form 5-methylcytosine"
cacagtgtagagatgccaactgctggagccaaattcaattccaaatccaaacataagcaacgtttgtgaatcgagatgctttgaggttcacccaactccaattttaccaattccctccaggg

SEQ ID NO: 1539 - DNA, 122 bp, Homo sapiens
  misc_feature (61)..(62): /note="This region represents a CpG dinucleotide"
  misc_feature (61)..(61): /note="Nucleotide may be methylated to form 5-methylcytosine"
tgctgtcatttttcttctgtgtgtaatgtgtacttttcagcaatttgaatatgatatgcccgtgtgtatgtggatgtgtgtatcatgcttggggttcactgagcctatgtgagttcgtagtt

SEQ ID NO: 1540 - DNA, 122 bp, Homo sapiens
  misc_feature (61)..(62): /note="This region represents a CpG dinucleotide"
  misc_feature (61)..(61): /note="Nucleotide may be methylated to form 5-methylcytosine"
ggcaggaggatcgcttgaagccaggagttcgaaaccagcctgagcaacatagtgagagcccgtctctacaaaaaaaatgttttaaaacttagctgggcatggtggcacgtgcctgtagtccc

SEQ ID NO: 1541 - DNA, 122 bp, Homo sapiens
  misc_feature (61)..(62): /note="This region represents a CpG dinucleotide"
  misc_feature (61)..(61): /note="Nucleotide may be methylated to form 5-methylcytosine"
gggactagggtgagaagtgtagcacctagggcacagaatctaaggatgtgggccaggcgccgtggctcatgcctataatcccagccctttgggaggctgaggtgggtggatcacttgggatc

SEQ ID NO: 1542 - DNA, 122 bp, Homo sapiens
  misc_feature (61)..(62): /note="This region represents a CpG dinucleotide"
  misc_feature (61)..(61): /note="Nucleotide may be methylated to form 5-methylcytosine"
agagcaagactctgtcgcaaagaaaaaaaaaaaaaaagatcctgagttctggattctctccgtgggacatcctcttcagaggccatctaactcagtgctgctcagctgaactttctgcagtg

SEQ ID NO: 1543 - DNA, 122 bp, Homo sapiens
  misc_feature (61)..(62): /note="This region represents a CpG dinucleotide"
  misc_feature (61)..(61): /note="Nucleotide may be methylated to form 5-methylcytosine"
cagcgcgcggagtggtgagactgagccgcgatggaacgcgctggggagacccagcctgttcggctccagggttcggagacatcctgggctgaaggcggcggcgaaccgaagaagccggcata

SEQ ID NO: 1544 - DNA, 122 bp, Homo sapiens
  misc_feature (61)..(62): /note="This region represents a CpG dinucleotide"
  misc_feature (61)..(61): /note="Nucleotide may be methylated to form 5-methylcytosine"
ctctggcgcgctgagggcggtgagcgagggcgccaaggcacaggtggggcgggagtcgagcgcggaggctcggggggcgggacgcggggcctgggagcggccagggaccgcggcagcgcctc

SEQ ID NO: 1545 - DNA, 122 bp, Homo sapiens
  misc_feature (61)..(62): /note="This region represents a CpG dinucleotide"
  misc_feature (61)..(61): /note="Nucleotide may be methylated to form 5-methylcytosine"
caggaatggggccatggtctctatcataaaacaatggtaatacacacagatgtgcacacacgtaaaatatgttaggcatcacaaatagaatgttagtattttggaatcaaatttccacttgc

SEQ ID NO: 1546 - DNA, 122 bp, Homo sapiens
  misc_feature (61)..(62): /note="This region represents a CpG dinucleotide"
  misc_feature (61)..(61): /note="Nucleotide may be methylated to form 5-methylcytosine"
gtgtggcaatgtacatacaatagcatgtgttttttccagtatgatgacctaaattcctttcgttatatacccagtaatggtgagggactaagtggctaagttggctggacttcctgggtcaa

SEQ ID NO: 1547 - DNA, 122 bp, Homo sapiens
  misc_feature (61)..(62): /note="This region represents a CpG dinucleotide"
  misc_feature (61)..(61): /note="Nucleotide may be methylated to form 5-methylcytosine"
attcttgctgaagacagcccagggtgatgagtggggagtgaggaatgtgatcaaatatcacgggtggaggcttcccactaaactgacttagcaggattcttgctgcagctgggctatacaat

SEQ ID NO: 1548 - DNA, 122 bp, Homo sapiens
  misc_feature (61)..(62): /note="This region represents a CpG dinucleotide"
  misc_feature (61)..(61): /note="Nucleotide may be methylated to form 5-methylcytosine"
tgccccggcgcaggcgcgatcgcgggccgcccctcccgccgggcgccctgcacgcgcccccgccccgcctccgcaggctcccccgctccgggcgcctctgattggctctcggccgggccagc

SEQ ID NO: 1549 - DNA, 122 bp, Homo sapiens
  misc_feature (61)..(62): /note="This region represents a CpG dinucleotide"
  misc_feature (61)..(61): /note="Nucleotide may be methylated to form 5-methylcytosine"
gggcaattcctggaactgagggttcctccctcttctggactatataaggtaacttccagacgttgccatgacatttgcaaactgtcgtggcactggtgggagtgtcttttcgcatgctaatg

SEQ ID NO: 1550 - DNA, 122 bp, Homo sapiens
  misc_feature (61)..(62): /note="This region represents a CpG dinucleotide"
  misc_feature (61)..(61): /note="Nucleotide may be methylated to form 5-methylcytosine"
tggacactgtataaaacggttgcgtgtctggaatgccgtcgttttgccccgcggccccatcgtacatgcgcatccccgcagccgccaccgtctccactttccgcagcagcgtccctgacgct

SEQ ID NO: 1551 - DNA, 122 bp, Homo sapiens
  misc_feature (61)..(62): /note="This region represents a CpG dinucleotide"
  misc_feature (61)..(61): /note="Nucleotide may be methylated to form 5-methylcytosine"
gagcctgaggaatgactcaactgatgaaatgacgttgggaaagtcgtgatcatccacaaacggcagggtacatcagcccagccagaaacaggaacttggttcacattccaaggagggcacaa

SEQ ID NO: 1552 - DNA, 122 bp, Homo sapiens
  misc_feature (61)..(62): /note="This region represents a CpG dinucleotide"
  misc_feature (61)..(61): /note="Nucleotide may be methylated to form 5-methylcytosine"
ggcgtagtaaggaagcccaacacaaccaattcccccactccccaaataaaccactacgaccggtcacattacgatgaccaaatcatcagcgatttgcacgaggcggtggggggtggggggtg

SEQ ID NO: 1553 - DNA, 122 bp, Homo sapiens
  misc_feature (61)..(62): /note="This region represents a CpG dinucleotide"
  misc_feature (61)..(61): /note="Nucleotide may be methylated to form 5-methylcytosine"
tatcgctggactccagagcggactggcaatattgtactaagctagagcctgtcatagggacgctgagctgaagtggaggctgacctttgcacactttaaaacagcccagaccatgccaaaga

SEQ ID NO: 1554 - DNA, 122 bp, Homo sapiens
  misc_feature (61)..(62): /note="This region represents a CpG dinucleotide"
  misc_feature (61)..(61): /note="Nucleotide may be methylated to form 5-methylcytosine"
cagatttggttaagagagtctaaaactatgttgtccaggttggcctcaaacacctgagctcgagtgatctctcatctcagtctcccgagtagctggtactacagccacatgccattgcacct

SEQ ID NO: 1555 - DNA, 122 bp, Homo sapiens
  misc_feature (61)..(62): /note="This region represents a CpG dinucleotide"
  misc_feature (61)..(61): /note="Nucleotide may be methylated to form 5-methylcytosine"
cgcccccgcccccgcccccgcccccgcccccgcccccgcccccgcccccgcccccgcccccgcccccgccccgctcggacccctccgctgcgcgcgcagtttcccacaaacccggaagcgga

SEQ ID NO: 1556 - DNA, 122 bp, Homo sapiens
  misc_feature (61)..(62): /note="This region represents a CpG dinucleotide"
  misc_feature (61)..(61): /note="Nucleotide may be methylated to form 5-methylcytosine"
tgcgaaactggtcttgacgtttgcttgacttgagggggccccacctggtgcccaagcccacgtaatgaactactaccaaccacaaatacttgaggcaagtccaggttccctatgactcaacc

SEQ ID NO: 1557 - DNA, 122 bp, Homo sapiens
  misc_feature (61)..(62): /note="This region represents a CpG dinucleotide"
  misc_feature (61)..(61): /note="Nucleotide may be methylated to form 5-methylcytosine"
atatattcctccagagatagactaagctggattaagcttatgtgtacacacatgcacgcacgtgcacacacacatttctccacttgtcaatatatcttacagactagtatgtatcagcacct

SEQ ID NO: 1558 - DNA, 122 bp, Homo sapiens
  misc_feature (61)..(62): /note="This region represents a CpG dinucleotide"
  misc_feature (61)..(61): /note="Nucleotide may be methylated to form 5-methylcytosine"
ccagcagggtaaaagtgtttccttttaaccacatccatgcccacatctattgttttttgacgttataattatgtcttaggctgtattttaaatcagggctctctgagcttgatctcatgtca

SEQ ID NO: 1559 - DNA, 122 bp, Homo sapiens
  misc_feature (61)..(62): /note="This region represents a CpG dinucleotide"
  misc_feature (61)..(61): /note="Nucleotide may be methylated to form 5-methylcytosine"
cctggatgggaaggattgtgccaggcatgggttcccgcagtgtgttcccctggctggcagcgtcgcggcacctgggagtcattaggcagcaagggagggaattgcgattctgggcggggctc

SEQ ID NO: 1560 - DNA, 122 bp, Homo sapiens
  misc_feature (61)..(62): /note="This region represents a CpG dinucleotide"
  misc_feature (61)..(61): /note="Nucleotide may be methylated to form 5-methylcytosine"
ataaatgtaaacaagaaaacaggctgggcatggtggcttgtgcctataatcccagcacttcgggaagtcaatgcacgcagatcgcttgagctcaggagttcaagacgagcctaggccacatg

SEQ ID NO: 1561 - DNA, 122 bp, Homo sapiens
  misc_feature (61)..(62): /note="This region represents a CpG dinucleotide"
  misc_feature (61)..(61): /note="Nucleotide may be methylated to form 5-methylcytosine"
ctgcccctcccacaaggtgagccaattgctagagatagtaaagaactcactggccgggcgcggtggctcatgcctgtaatcccagcactttgggaggaagaggtgggtggatcacaaggtca

SEQ ID NO: 1562 - DNA, 122 bp, Homo sapiens
  misc_feature (61)..(62): /note="This region represents a CpG dinucleotide"
  misc_feature (61)..(61): /note="Nucleotide may be methylated to form 5-methylcytosine"
tcatcttaggtttaaccacaaatcctctgtttctactcactgagtcaatacatcttgaatcgcagaccaggaaactcaggtggaaaactgctcatttgttttctttatgagctaactacagt

SEQ ID NO: 1563 - DNA, 122 bp, Homo sapiens
  misc_feature (61)..(62): /note="This region represents a CpG dinucleotide"
  misc_feature (61)..(61): /note="Nucleotide may be methylated to form 5-methylcytosine"
ccccctggggcagctgagcggggtaatgccctccgtgatggagagcgcgtgtcccacagccgggccaagacggtgcccaaccgcagatagccccactctgaggatgacagcagcgaggagga

SEQ ID NO: 1564 - DNA, 122 bp, Homo sapiens
  misc_feature (61)..(62): /note="This region represents a CpG dinucleotide"
  misc_feature (61)..(61): /note="Nucleotide may be methylated to form 5-methylcytosine"
ggattttcctgggagtaactgctgagcgtcctgtaaacagatgggctgggctcttgctgccgcaagcctgtgtggccaggttcaggcagcccagggccacaagctcccttgatctttgtaaa

SEQ ID NO: 1565 - DNA, 122 bp, Homo sapiens
  misc_feature (61)..(62): /note="This region represents a CpG dinucleotide"
  misc_feature (61)..(61): /note="Nucleotide may be methylated to form 5-methylcytosine"
atgtcaggtgaccttaagcaaatcactttccctctttgagcctcagtttcagctataaaacgatagtatgcatggttctttagtgcaggacttaaatgtagtaaatgccacttagttactat

SEQ ID NO: 1566 - DNA, 122 bp, Homo sapiens
  misc_feature (61)..(62): /note="This region represents a CpG dinucleotide"
  misc_feature (61)..(61): /note="Nucleotide may be methylated to form 5-methylcytosine"
aagctgctaatcttaagaaagaaagaggaaactaatatttcttacatttcagtaatcacacggcagcgtgctgtgtgctttatgttcatatgtaacaccagctctgcaagggagataccata

SEQ ID NO: 1567 - DNA, 122 bp, Homo sapiens
  misc_feature (61)..(62): /note="This region represents a CpG dinucleotide"
  misc_feature (61)..(61): /note="Nucleotide may be methylated to form 5-methylcytosine"
caggagaaggctatttccgtttccgtacggaagcaaaggagccaagaccatggcgaaagccggggataagagcagcagcagcgggaagaaaagtctaaaacggaaagccgctgccgaagaac

SEQ ID NO: 1568 - DNA, 122 bp, Homo sapiens
  misc_feature (61)..(62): /note="This region represents a CpG dinucleotide"
  misc_feature (61)..(61): /note="Nucleotide may be methylated to form 5-methylcytosine"
acctcgtgatctgcccacctcggcctcccaaagtgctgggattacaggcgtgagtcaccacgcctggcctagctagggctgatatttaacaatcaggaaaaagagcccctgagacctttaca

SEQ ID NO: 1569 - DNA, 122 bp, Homo sapiens
  misc_feature (61)..(62): /note="This region represents a CpG dinucleotide"
  misc_feature (61)..(61): /note="Nucleotide may be methylated to form 5-methylcytosine"
tgcaatacagcacttgcataataaacagcccgggctgagccaaagcacagaaaacaccagcgccacagaaggccactgtggggcagcctctcaacctcgagttctgttaaataaaaaataaa

SEQ ID NO: 1570 - DNA, 122 bp, Homo sapiens
  misc_feature (61)..(62): /note="This region represents a CpG dinucleotide"
  misc_feature (61)..(61): /note="Nucleotide may be methylated to form 5-methylcytosine"
tttacatagctacaatgacatgatcacatagttaacagcacacagtgtaatctcataccccgaatcacatttccttgactgtcctcttttagcagctggtttgcttcagattgcaaagaagt

SEQ ID NO: 1571 - DNA, 122 bp, Homo sapiens
  misc_feature (61)..(62): /note="This region represents a CpG dinucleotide"
  misc_feature (61)..(61): /note="Nucleotide may be methylated to form 5-methylcytosine"
ggcggcggcggggggtggcgtggggggcgtgcgaaagaaactcggggctggcgcggaggccgagggtccttcgcggggggctgctccggagtgggggatgcgaggaggcgctggggacggcg

SEQ ID NO: 1572 - DNA, 122 bp, Homo sapiens
  misc_feature (61)..(62): /note="This region represents a CpG dinucleotide"
  misc_feature (61)..(61): /note="Nucleotide may be methylated to form 5-methylcytosine"
ctgataagaaacatttacaatctattctctctgaagccccctacctggaagcgttatctgcgtgataaatccttggtctctacaaccccttatagtaactcagacattccttgcttttgata

SEQ ID NO: 1573 - DNA, 122 bp, Homo sapiens
  misc_feature (61)..(62): /note="This region represents a CpG dinucleotide"
  misc_feature (61)..(61): /note="Nucleotide may be methylated to form 5-methylcytosine"
atcattacccagcaggtggctcaaaacgacagaagcatgttctctcacagtcctggaggccggaagtccaagatcaagatgacagcaggcctcactccctccaaaggctctaagggagaaac

SEQ ID NO: 1574 - DNA, 122 bp, Homo sapiens
  misc_feature (61)..(62): /note="This region represents a CpG dinucleotide"
  misc_feature (61)..(61): /note="Nucleotide may be methylated to form 5-methylcytosine"
gcctcaacctcctggagtcaagtgaacctccagtctcagcctcttgaataacagggaccacggccgtgtgccactcacctggctaatttttttacattttttttttttttgtagagacaggg

SEQ ID NO: 1575 - DNA, 122 bp, Homo sapiens
  misc_feature (61)..(62): /note="This region represents a CpG dinucleotide"
  misc_feature (61)..(61): /note="Nucleotide may be methylated to form 5-methylcytosine"
gcagcaaacacttacatggactcctccgcctgcttcttggcatcggctgcctgctgctcacggagcttctctgccacctgagcctgccgctcaatctcactgaagctctggctgctcacctt

SEQ ID NO: 1576 - DNA, 122 bp, Homo sapiens
  misc_feature (61)..(62): /note="This region represents a CpG dinucleotide"
  misc_feature (61)..(61): /note="Nucleotide may be methylated to form 5-methylcytosine"
gctgtggtaggcaaaagcttccttcctcactgtcttcaaggagtgaatttcttaccagtccgttatgctaccaaaaaggcatgcatgggtcaccagggacatcttttctgattggtttcaca

SEQ ID NO: 1577 - DNA, 122 bp, Homo sapiens
  misc_feature (61)..(62): /note="This region represents a CpG dinucleotide"
  misc_feature (61)..(61): /note="Nucleotide may be methylated to form 5-methylcytosine"
aatgacagccaagtcttccagtccaggaattaccaggagccttatcagaaccagaaattgcgtctttagacaacgtttatagcctcatagaagataccaggcttcactttgtcaagctctac

SEQ ID NO: 1578 - DNA, 122 bp, Homo sapiens
  misc_feature (61)..(62): /note="This region represents a CpG dinucleotide"
  misc_feature (61)..(61): /note="Nucleotide may be methylated to form 5-methylcytosine"
tctcttttcccagctgtcagagacttgactgcgtgctgcaaaacaagtcatactactgtgcgcaaagagtcagtgggcagcaggcgaggcctcgagagacttccctaggcatctcagggtgt

SEQ ID NO: 1579 - DNA, 122 bp, Homo sapiens
  misc_feature (61)..(62): /note="This region represents a CpG dinucleotide"
  misc_feature (61)..(61): /note="Nucleotide may be methylated to form 5-methylcytosine"
accaccaacaataaaaaaacaagacaaagaatggcatcatataatgataaaaggttcaaacgacaagaagattgaactattgtaaagtatacacgaccaacactggagagcccagatttaca

SEQ ID NO: 1580 - DNA, 122 bp, Homo sapiens
  misc_feature (61)..(62): /note="This region represents a CpG dinucleotide"
  misc_feature (61)..(61): /note="Nucleotide may be methylated to form 5-methylcytosine"
gattgccaaacatcatagggtagatttctaacagaactagatgcttacgcacctgaactgcgttattttccatatttgtcatatttctttaaatatcaaagagttgagggagatttcaagca

SEQ ID NO: 1581 - DNA, 122 bp, Homo sapiens
  misc_feature (61)..(62): /note="This region represents a CpG dinucleotide"
  misc_feature (61)..(61): /note="Nucleotide may be methylated to form 5-methylcytosine"
aaaaaaaaaagacgtattattcaaggtcatgatcagactattacatttagcaaccaacagcgtgggtgcaaaaaaaaatctacattaaaaccctgtgttggaatgttttacactttccacag

SEQ ID NO: 1582 - DNA, 122 bp, Homo sapiens
  misc_feature (61)..(62): /note="This region represents a CpG dinucleotide"
  misc_feature (61)..(61): /note="Nucleotide may be methylated to form 5-methylcytosine"
catggacttcccagccttcagaactatgagccaataaatttctgttcattgtcaattactcggtctgtgatattttgttatagcagcacaaagaaccctaagacatgtttcaacagagcaat

SEQ ID NO: 1583 - DNA, 122 bp, Homo sapiens
  misc_feature (61)..(62): /note="This region represents a CpG dinucleotide"
  misc_feature (61)..(61): /note="Nucleotide may be methylated to form 5-methylcytosine"
cagccgctgccgctgccgtccggcgcgctacagactcccgagaacagccctggctgtcagcgagcaccagccgcttcctgtccccatcgcggagactggaggggcgcaccacggccatggag

SEQ ID NO: 1584 - DNA, 122 bp, Homo sapiens
  misc_feature (61)..(62): /note="This region represents a CpG dinucleotide"
  misc_feature (61)..(61): /note="Nucleotide may be methylated to form 5-methylcytosine"
taactgcaagatctcctagcggggatgggcggggccgcctgtgcagatgccaggagggctcgagctggacactcctggctggacgccaggccagtgccgcctacgtggagactgtccacaca

SEQ ID NO: 1585 - DNA, 122 bp, Homo sapiens
  misc_feature (61)..(62): /note="This region represents a CpG dinucleotide"
  misc_feature (61)..(61): /note="Nucleotide may be methylated to form 5-methylcytosine"
cttttcttgatgaatttgagggcctgtttgaccttggagaccttcagtaactccatgccacgccactcgttaggggtgaagccacacacctctgggatcatgtcccacacaaatttagtgag

SEQ ID NO: 1586 - DNA, 122 bp, Homo sapiens
  misc_feature (61)..(62): /note="This region represents a CpG dinucleotide"
  misc_feature (61)..(61): /note="Nucleotide may be methylated to form 5-methylcytosine"
agactgaaatcccagctgtgcactgccctggtggtctcctgtcccaaccgggcgttgatccgggccttgcaggctcacgtgctctgcagaaaatagagaaaccaataaatgctcccctgggt

SEQ ID NO: 1587 - DNA, 122 bp, Homo sapiens
  misc_feature (61)..(62): /note="This region represents a CpG dinucleotide"
  misc_feature (61)..(61): /note="Nucleotide may be methylated to form 5-methylcytosine"
atccgcccgcctcggcctcccaaagtgttgggattacaggcgtgagccagcgtgcccggccggcattccacttttacacagtgacaaagctctgggatgcagccagagttaaaggaatctcc

SEQ ID NO: 1588 - DNA, 122 bp, Homo sapiens
  misc_feature (61)..(62): /note="This region represents a CpG dinucleotide"
  misc_feature (61)..(61): /note="Nucleotide may be methylated to form 5-methylcytosine"
gtcgccttagacaagtttataggtttctgagcagctccctgaatacccacgaggagataccggtggaaatcgtcaaaagttctccctccacttgagaaatttgggtcccaattaggtcccaa

SEQ ID NO: 1589 - DNA, 122 bp, Homo sapiens
  misc_feature (61)..(62): /note="This region represents a CpG dinucleotide"
  misc_feature (61)..(61): /note="Nucleotide may be methylated to form 5-methylcytosine"
agaagcgtttgaacccgggaggtggaggttgccgtgagcagagaccacgccactgtactccggtctgggcgacagagcaacactctgtctcaaaaaaaagaaaaaaaaaaaaaaagaaattc

SEQ ID NO: 1590 - DNA, 122 bp, Homo sapiens
  misc_feature (61)..(62): /note="This region represents a CpG dinucleotide"
  misc_feature (61)..(61): /note="Nucleotide may be methylated to form 5-methylcytosine"
tttagggactgtgtcaaatgttcaccaaaggacattcagatcattcattcattcaacaagcgtttagtaatgtatattgcaaaattgctgacagtagattttaaatgttcacactcctccca

SEQ ID NO: 1591 - DNA, 122 bp, Homo sapiens
  misc_feature (61)..(62): /note="This region represents a CpG dinucleotide"
  misc_feature (61)..(61): /note="Nucleotide may be methylated to form 5-methylcytosine"
gcgggaggcggaggtggtcactttaggcacaggttaggtttttctttcacaagttacaaacgtagtggaaacctaacataaaaatagaggcacagtaaggggaaaatgactgtagttattct

SEQ ID NO: 1592 - DNA, 122 bp, Homo sapiens
  misc_feature (61)..(62): /note="This region represents a CpG dinucleotide"
  misc_feature (61)..(61): /note="Nucleotide may be methylated to form 5-methylcytosine"
gctgaagctccggatgtgcgaaatggctccgcagtgcgaccgagtgtgcaggggcctcggcggcgggagggacggaggggagacggcggcgccggggcgctcaccccgctagccagccgagc

SEQ ID NO: 1593 - DNA, 122 bp, Homo sapiens
  misc_feature (61)..(62): /note="This region represents a CpG dinucleotide"
  misc_feature (61)..(61): /note="Nucleotide may be methylated to form 5-methylcytosine"
atcttatattctgaactcatgccctaccttctacccccttgatgtatttgttcatggagccggttaccctaaactcatcatttttaggatggaagtttattctaaaattgacacaatgtaaa

SEQ ID NO: 1594 - DNA, 122 bp, Homo sapiens
  misc_feature (61)..(62): /note="This region represents a CpG dinucleotide"
  misc_feature (61)..(61): /note="Nucleotide may be methylated to form 5-methylcytosine"
acctcataatccgcccgcctgggcctcccaaagtgctgggattacaggcgtgagccaccacgcccggccgaggaagaaattttgaagtgaaacccctgtataaagcaagttctctcacagag

SEQ ID NO: 1595 - DNA, 122 bp, Homo sapiens
  misc_feature (61)..(62): /note="This region represents a CpG dinucleotide"
  misc_feature (61)..(61): /note="Nucleotide may be methylated to form 5-methylcytosine"
aaaaggcttctgaaatcaggcaatgcctttctaattcttacaccaacctctggagttgggcgacatggcttctcccctttctaggtcccatgaaagccatcttgctattactcacctttggg

SEQ ID NO: 1596 - DNA, 122 bp, Homo sapiens
  misc_feature (61)..(62): /note="This region represents a CpG dinucleotide"
  misc_feature (61)..(61): /note="Nucleotide may be methylated to form 5-methylcytosine"
tttaggaggagaggaggaggaaggttactgaagcccagaaaggtgacgttacttgttacacggacacacagccgttcaatggaagaacccatactcaacaggaatggccaccctgtcattct

SEQ ID NO: 1597 - DNA, 122 bp, Homo sapiens
  misc_feature (61)..(62): /note="This region represents a CpG dinucleotide"
  misc_feature (61)..(61): /note="Nucleotide may be methylated to form 5-methylcytosine"
ccaagtctcagtgaaagtgaaaattgctgaacatttcaagattgttctaatggccaaagccgtaggactgacaggtgtcactcagcatttctagtcaatggaactctaacagaaatgaaggc

SEQ ID NO: 1598 - DNA, 122 bp, Homo sapiens
  misc_feature (61)..(62): /note="This region represents a CpG dinucleotide"
  misc_feature (61)..(61): /note="Nucleotide may be methylated to form 5-methylcytosine"
cctgggtaatctttctattatgtgtcatccatctcctgacaagcattgcaggtaccagtgcgcttatcacttgcatcagttagaatgagaaaagccaattcaaaccgccttaacgagaaaaa

SEQ ID NO: 1599 - DNA, 122 bp, Homo sapiens
  misc_feature (61)..(62): /note="This region represents a CpG dinucleotide"
  misc_feature (61)..(61): /note="Nucleotide may be methylated to form 5-methylcytosine"
aagcccttagaaaccaagaacaagttctcccaggtgaagctgttggcaggagctgtgaagcgtaagagctcagagagtgacaacagtgtgaaaagactgaaaccggaccctgagccagatga

SEQ ID NO: 1600 - DNA, 122 bp, Homo sapiens
  misc_feature (61)..(62): /note="This region represents a CpG dinucleotide"
  misc_feature (61)..(61): /note="Nucleotide may be methylated to form 5-methylcytosine"
aagattttcaaaaggagcacacacatttagtaaagcactctagctaatgcaggatacacacgatgtgcgttttcttattccttgctctaaccactggtctctcagatccctgcagagcagta

SEQ ID NO: 1601 - DNA, 122 bp, Homo sapiens
  misc_feature (61)..(62): /note="This region represents a CpG dinucleotide"
  misc_feature (61)..(61): /note="Nucleotide may be methylated to form 5-methylcytosine"
cggcggcggcggcgggcggactggggagtccgcagcacctgcgagctggtgttgggtccccgcggcgaggctgcctggaggaggagcgagcggatgctgccctcgcccgccgccgccggtgc

SEQ ID NO: 1602 - DNA, 122 bp, Homo sapiens
  misc_feature (61)..(62): /note="This region represents a CpG dinucleotide"
  misc_feature (61)..(61): /note="Nucleotide may be methylated to form 5-methylcytosine"
ccatccaagcccgcgccgggcggaagtgagcgcaagccccgcccccgcccctccaggccccgcccccgccccggccccgcctccagacctctgcagcgaggccgcccccctccgagacagtc

SEQ ID NO: 1603 - DNA, 122 bp, Homo sapiens
  misc_feature (61)..(62): /note="This region represents a CpG dinucleotide"
  misc_feature (61)..(61): /note="Nucleotide may be methylated to form 5-methylcytosine"
ccttctcaaaaaataaataaaaggatactatggtgatacccagtttacactttgggaaaccgaggttgtcatttcactgaagtgaggtcactcgctcttgtatgactcaatatgactcttgt

SEQ ID NO: 1604 - DNA, 122 bp, Homo sapiens
  misc_feature (61)..(62): /note="This region represents a CpG dinucleotide"
  misc_feature (61)..(61): /note="Nucleotide may be methylated to form 5-methylcytosine"
tgtaaattgaaacttcctttaatacttaactgtgagttaaacatagttctggagctccatcgaaagggtcttagtcagccaggcacagtggcttacacctgtaatcccagcattctgggaag

SEQ ID NO: 1605 - DNA, 122 bp, Homo sapiens
  misc_feature (61)..(62): /note="This region represents a CpG dinucleotide"
  misc_feature (61)..(61): /note="Nucleotide may be methylated to form 5-methylcytosine"
aactttggaggcagaagctctggcccctaacgtgggggaggccaatactttgccaaaccacgaaaccaaggtggctatggtagttctggtagcagcactagctatagcagtggcagatttca

SEQ ID NO: 1606 - DNA, 122 bp, Homo sapiens
  misc_feature (61)..(62): /note="This region represents a CpG dinucleotide"
  misc_feature (61)..(61): /note="Nucleotide may be methylated to form 5-methylcytosine"
gccttcgccctgcctttttgttctgtctggacccacagtggattggatgatgcctgctcacgtgggtgaaagtggaacttttctgtctactgatttaaatgcttatctcttctgcaaacacc

SEQ ID NO: 1607 - DNA, 122 bp, Homo sapiens
  misc_feature (61)..(62): /note="This region represents a CpG dinucleotide"
  misc_feature (61)..(61): /note="Nucleotide may be methylated to form 5-methylcytosine"
gtctctgtgtgggggagctgttctcttctttcttccttctttcttggttgttaaacttttcgctccttaaaaccaaaaaaaaaaaaaaaatgttttcctggcttagagtttgagctcttggg

SEQ ID NO: 1608 - DNA, 122 bp, Homo sapiens
  misc_feature (61)..(62): /note="This region represents a CpG dinucleotide"
  misc_feature (61)..(61): /note="Nucleotide may be methylated to form 5-methylcytosine"
gagctaagtgaagaaattgccgagctggctgatggaggcttgtgttccctgggtcccatccgccttcccaggctgtgcttcatcagctccgtgagtcatgtggggcagcggttcaagaagtg

SEQ ID NO: 1609 - DNA, 122 bp, Homo sapiens
  misc_feature (61)..(62): /note="This region represents a CpG dinucleotide"
  misc_feature (61)..(61): /note="Nucleotide may be methylated to form 5-methylcytosine"
cagctttcattccacaattactttgtgttcatccatgcaatttggacagacgtaatacaccgcacagcaggtccaagaattgtccaactggccaaaagttatcagagttaccctcacccttt

SEQ ID NO: 1610 - DNA, 122 bp, Homo sapiens
  misc_feature (61)..(62): /note="This region represents a CpG dinucleotide"
  misc_feature (61)..(61): /note="Nucleotide may be methylated to form 5-methylcytosine"
ggggtctctgggaggcttgctttattgttctgcagccggagcgagcggcagtggcgacggcggcggcggcggcggcggcggcggcgggcggggggcgggggtcctggggggaggggtgcgca

SEQ ID NO: 1611 - DNA, 122 bp, Homo sapiens
  misc_feature (61)..(62): /note="This region represents a CpG dinucleotide"
  misc_feature (61)..(61): /note="Nucleotide may be methylated to form 5-methylcytosine"
ttgacaccatatttccagttagttgtactgtgaactgtggtcttctatccttccaaactccgtgttactttcttctaatgtatattttgtctcagtcacatagttgtcgaaaacccaggaac

SEQ ID NO: 1612 - DNA, 122 bp, Homo sapiens
  misc_feature (61)..(62): /note="This region represents a CpG dinucleotide"
  misc_feature (61)..(61): /note="Nucleotide may be methylated to form 5-methylcytosine"
taaaatatagaaatagattgaccctaaaattactatattactgtgagtttgagctccttccggcttaagtattgaccagctctcatacatgtgtagatgaaaatgaaagatcctattctgaa

SEQ ID NO: 1613 - DNA, 122 bp, Homo sapiens
  misc_feature (61)..(62): /note="This region represents a CpG dinucleotide"
  misc_feature (61)..(61): /note="Nucleotide may be methylated to form 5-methylcytosine"
cagcacagtctgggatcctggctctttctgtaacaagttgttgtgcatgaggcccggtcacgagggcccttcactactgggctcaaggaacacaaataggtcaacttgtttttgtgattgtc

SEQ ID NO: 1614 - DNA, 122 bp, Homo sapiens
  misc_feature (61)..(62): /note="This region represents a CpG dinucleotide"
  misc_feature (61)..(61): /note="Nucleotide may be methylated to form 5-methylcytosine"
ttaatcccagccaaattccttctcagagttatggataaaatctgtgtatgtagctgtcttcgtccatttttgtgttgctataacagaatagctcagactgggtaatttatttttaaaaagaa

SEQ ID NO: 1615 - DNA, 122 bp, Homo sapiens
  misc_feature (61)..(62): /note="This region represents a CpG dinucleotide"
  misc_feature (61)..(61): /note="Nucleotide may be methylated to form 5-methylcytosine"
tgatggaagatgggtctaggagtcactgtcctgaggatcttcaagtacaggaaatgttcacgtatgtctaacttctttccttctgaatcagaccactcagttggccaacctaccagccttca

SEQ ID NO: 1616 - DNA, 122 bp, Homo sapiens
  misc_feature (61)..(62): /note="This region represents a CpG dinucleotide"
  misc_feature (61)..(61): /note="Nucleotide may be methylated to form 5-methylcytosine"
agggaggtcatacttaagcacctactatataccagggatagtactatgcaaagtcacacacgtttacgttaaactcatttaagaaatactgattagaaatttgtaaaatcatctaaccattt

SEQ ID NO: 1617 - DNA, 122 bp, Homo sapiens
  misc_feature (61)..(62): /note="This region represents a CpG dinucleotide"
  misc_feature (61)..(61): /note="Nucleotide may be methylated to form 5-methylcytosine"
cttggacttcctttcagcatccaccctgcctggctactgctttcttgttttgtgtttttgcgtttaaattcccagtcttagttttctgccctgtcaagtcctggtggtcggacgacagaagt

SEQ ID NO: 1618 - DNA, 122 bp, Homo sapiens
  misc_feature (61)..(62): /note="This region represents a CpG dinucleotide"
  misc_feature (61)..(61): /note="Nucleotide may be methylated to form 5-methylcytosine"
cgtgatgtccttggtcaagggctctcctctgggccggtggtggttgcagagagaagcccccgccgccgtcgctcctcgggaaaggaagtcgcgggtgaacaaccgaatatgcgatgaaaagg

SEQ ID NO: 1619 - DNA, 122 bp, Homo sapiens
  misc_feature (61)..(62): /note="This region represents a CpG dinucleotide"
  misc_feature (61)..(61): /note="Nucleotide may be methylated to form 5-methylcytosine"
ggtgaggctccgacaacgcccaggagcacctgtgatgccgtcattaggaacctacctcgtcgccccgattccatcccctcccgacacctgactgcgcgtgttctcctttgcagttctttcct

SEQ ID NO: 1620 - DNA, 122 bp, Homo sapiens
  misc_feature (61)..(62): /note="This region represents a CpG dinucleotide"
  misc_feature (61)..(61): /note="Nucleotide may be methylated to form 5-methylcytosine"
ggatcagctccgatgattgctctccattggtcattgtcaacttccgatggcctgccactacgctcctcatcttcaaggctctcatctcctttgcaaacttcttgaaccaccactgcgctgta

SEQ ID NO: 1621 - DNA, 122 bp, Homo sapiens
  misc_feature (61)..(62): /note="This region represents a CpG dinucleotide"
  misc_feature (61)..(61): /note="Nucleotide may be methylated to form 5-methylcytosine"
acatgaagtggctttgttgagagcagctgcattaataacaaccccaaggagcccagccaacgccaactctctttctgtgggctaccagtatctcccagcttgagtaaatattttcaatcagt

SEQ ID NO: 1622 - DNA, 122 bp, Homo sapiens
  misc_feature (61)..(62): /note="This region represents a CpG dinucleotide"
  misc_feature (61)..(61): /note="Nucleotide may be methylated to form 5-methylcytosine"
taaattcacgccatgcaggtttgccggacgagtccgagtggcccaggcattgtactaggacggacgtagctttttctacggccaaatggtaactgaccgtagaggatttcttttccttcttt

SEQ ID NO: 1623 - DNA, 122 bp, Homo sapiens
  misc_feature (61)..(62): /note="This region represents a CpG dinucleotide"
  misc_feature (61)..(61): /note="Nucleotide may be methylated to form 5-methylcytosine"
gggcagggcttgggacctgcagcccgccatggccgaaccccccccacccccgtgggctcccgcgcagcccgagtctccccaacagggtgctgccccctgctccatggcgcccggtcccatca

SEQ ID NO: 1624 - DNA, 122 bp, Homo sapiens
  misc_feature (61)..(62): /note="This region represents a CpG dinucleotide"
  misc_feature (61)..(61): /note="Nucleotide may be methylated to form 5-methylcytosine"
gggcaagtgagaatttgtagccagagagtaaggtgagggtcagtggatggaaaattactacgaggaaacatcaggggtcaggggcattctggctaaatttacctgataggattctcactgaa

SEQ ID NO: 1625 - DNA, 122 bp, Homo sapiens
  misc_feature (61)..(62): /note="This region represents a CpG dinucleotide"
  misc_feature (61)..(61): /note="Nucleotide may be methylated to form 5-methylcytosine"
taagacaatggacatttctcttacagttctggaggccagaagtccaaaatccagctgggccgtgctcccactggggcttgaggggagaatgtgtcctttgactcttccagcttctggtgact

SEQ ID NO: 1626 - DNA, 122 bp, Homo sapiens
  misc_feature (61)..(62): /note="This region represents a CpG dinucleotide"
  misc_feature (61)..(61): /note="Nucleotide may be methylated to form 5-methylcytosine"
cttccctggatggaggggtgtcataaattgaactgtctctcccccaaattaatatgtgaacgtcccaactcgcaataactcagaatgtgaacttatttggaaattgtgtggtttgcagatat

SEQ ID NO: 1627 - DNA, 122 bp, Homo sapiens
  misc_feature (61)..(62): /note="This region represents a CpG dinucleotide"
  misc_feature (61)..(61): /note="Nucleotide may be methylated to form 5-methylcytosine"
aggtttggattagtgcccttatgaaagagaccccagagatctagctagccccttccaccacgcgaggacacagtgagaaggagccatctatgaagcagaaaacaaaccctcaccagacacta

SEQ ID NO: 1628 - DNA, 122 bp, Homo sapiens
  misc_feature (61)..(62): /note="This region represents a CpG dinucleotide"
  misc_feature (61)..(61): /note="Nucleotide may be methylated to form 5-methylcytosine"
ccgcacttgcacacggagtgtggggggccaggcctgggaccaggagctggggccgggcttcggcgcagaggcaggaagaggaagcggcacccgcttcggggacccagccggcggccaggcca

SEQ ID NO: 1629 - DNA, 122 bp, Homo sapiens
  misc_feature (61)..(62): /note="This region represents a CpG dinucleotide"
  misc_feature (61)..(61): /note="Nucleotide may be methylated to form 5-methylcytosine"
ttcagttttcttactgggaatacctggagctcttttctcaaaattaggacccacctactccgtactttattttttttcctaggtagtagaagtagaaattctcatgtagctccactccatat

SEQ ID NO: 1630 - DNA, 122 bp, Homo sapiens
  misc_feature (61)..(62): /note="This region represents a CpG dinucleotide"
  misc_feature (61)..(61): /note="Nucleotide may be methylated to form 5-methylcytosine"
atccgaacatcagaaggaacagactctggacgcgcggccgttaagaactgtaacactcaccggacccgccccctttaagaactgtaacacaccgcgagggtctggggcttcattcttgaagt

SEQ ID NO: 1631 - DNA, 122 bp, Homo sapiens
  misc_feature (61)..(62): /note="This region represents a CpG dinucleotide"
  misc_feature (61)..(61): /note="Nucleotide may be methylated to form 5-methylcytosine"
gccactctcatcactcaataaaatttccacattcatcatccttcaatttgttcatgtgaccgcattcttcttggaactggacaagaattcaagacctaccaaatgtgggtaccaaaaaggct

SEQ ID NO: 1632 - DNA, 122 bp, Homo sapiens
  misc_feature (61)..(62): /note="This region represents a CpG dinucleotide"
  misc_feature (61)..(61): /note="Nucleotide may be methylated to form 5-methylcytosine"
ggtctcattatgttgcgcaggctggtcttgaattcctaagctcttgtgatcctcccatgtcggcttcccaaagtgctgggattacaggtgtgagccaccatgccctgccaaaatgaatattt

SEQ ID NO: 1633 - DNA, 122 bp, Homo sapiens
  misc_feature (61)..(62): /note="This region represents a CpG dinucleotide"
  misc_feature (61)..(61): /note="Nucleotide may be methylated to form 5-methylcytosine"
ttttttagagatggggtcttgctatgttgcctaggctggagagcagtggatattcaccagcgtgatcccactattgatgagcatgggagttttgacctgctccatttctgtcttggtttacc

SEQ ID NO: 1634 - DNA, 122 bp, Homo sapiens
  misc_feature (61)..(62): /note="This region represents a CpG dinucleotide"
  misc_feature (61)..(61): /note="Nucleotide may be methylated to form 5-methylcytosine"
aaccacagtgacatactacctcacatccactaggatagctataatcaaaaagatacataacgaacaagtcttggtgacaatgtggaaaaagtgaaaccataacacactgctgtcatgaaagt

SEQ ID NO: 1635 - DNA, 122 bp, Homo sapiens
  misc_feature (61)..(62): /note="This region represents a CpG dinucleotide"
  misc_feature (61)..(61): /note="Nucleotide may be methylated to form 5-methylcytosine"
taacacttgacagaacagcagattcgctctttccttgttcatctagagcaatgggttctccgacttcaaagggcatctgaatcacccgagtggaatggcaagcagagccacttgcactgttt

SEQ ID NO: 1636 - DNA, 122 bp, Homo sapiens
  misc_feature (61)..(62): /note="This region represents a CpG dinucleotide"
  misc_feature (61)..(61): /note="Nucleotide may be methylated to form 5-methylcytosine"
acctttggaggaactgtcagactgtttcccacaggctgtctcattttacattcccaccagcggtgtatgagggtgctgatttctctacatcctcaccaaccacttgttatcatctgactttg

SEQ ID NO: 1637 - DNA, 122 bp, Homo sapiens
  misc_feature (61)..(62): /note="This region represents a CpG dinucleotide"
  misc_feature (61)..(61): /note="Nucleotide may be methylated to form 5-methylcytosine"
agagctggggttgtttccagtctgatatagtcaacagtcagtgtggaatcccagaacctgcgtgggagacccagaggggagtgttcataatcgtaaatgcctgcctgctagaaagacctttg

SEQ ID NO: 1638 - DNA, 122 bp, Homo sapiens
  misc_feature (61)..(62): /note="This region represents a CpG dinucleotide"
  misc_feature (61)..(61): /note="Nucleotide may be methylated to form 5-methylcytosine"
aagtgctaggattacaagcatgagccaccgcgcctggccatctcttcacttttaattctacgcttcgagagatatttactgggtacctactgcgtttgccaggccctgttctagaatgtaaa

SEQ ID NO: 1639 - DNA, 122 bp, Homo sapiens
  misc_feature (61)..(62): /note="This region represents a CpG dinucleotide"
  misc_feature (61)..(61): /note="Nucleotide may be methylated to form 5-methylcytosine"
aggtagcgacccttagagacgcaacgtggcgcagcggactcggctgcgtggggcaagggccggggccggacacaggagcagcggggatgccgggtgcgctccgagggtgtggcccccgggct

SEQ ID NO: 1640 - DNA, 122 bp, Homo sapiens
  misc_feature (61)..(62): /note="This region represents a CpG dinucleotide"
  misc_feature (61)..(61): /note="Nucleotide may be methylated to form 5-methylcytosine"
ctcccagcatacttctgcatgcctagccatgaaaattacccagtttgccctgtttctttgcgatgagagagaaatactattccccacaagggctaagaaataaatgcagagcaaggaattta

SEQ ID NO: 1641 - DNA, 122 bp, Homo sapiens
  misc_feature (61)..(62): /note="This region represents a CpG dinucleotide"
  misc_feature (61)..(61): /note="Nucleotide may be methylated to form 5-methylcytosine"
ttcaaattacacatttaaaattccggcatcagttcctttttgagtcatctaggtctctcacgtcagtaaatattgagctactgtaaagctgaagttacttacgtagtaacataacttactta

SEQ ID NO: 1642 - DNA, 122 bp, Homo sapiens
  misc_feature (61)..(62): /note="This region represents a CpG dinucleotide"
  misc_feature (61)..(61): /note="Nucleotide may be methylated to form 5-methylcytosine"
agataatagaaatatcgtgtacagaaacaatatcatcatcagaggcacacactgcccagacgctagccaatactactcctactcttgggcaaacaggaaagctacatttcccagccttcctt

SEQ ID NO: 1643 - DNA, 122 bp, Homo sapiens
  misc_feature (61)..(62): /note="This region represents a CpG dinucleotide"
  misc_feature (61)..(61): /note="Nucleotide may be methylated to form 5-methylcytosine"
tcccccgcccccacctccccccacactaacaagtgcggcttctgccccggcggctcctcccggtcgccgccaccgcctccatgccggatcacgtgactcttccgccccgcccccttcccctg

SEQ ID NO: 1644 - DNA, 122 bp, Homo sapiens
  misc_feature (61)..(62): /note="This region represents a CpG dinucleotide"
  misc_feature (61)..(61): /note="Nucleotide may be methylated to form 5-methylcytosine"
gtaagtaacatgaaatagtattgtatacctataaccatttgagctaaaaccaaaaccagacgttgttgtcattgtatgaggaattcactaatgtatttagcattctcaatatagtaaaatcc

SEQ ID NO: 1645 - DNA, 122 bp, Homo sapiens
  misc_feature (61)..(62): /note="This region represents a CpG dinucleotide"
  misc_feature (61)..(61): /note="Nucleotide may be methylated to form 5-methylcytosine"
ctttgaatatttataggtccctacactgaattttcaaagcccaagataaaaatcacatagcggcccaggtccagacccaggcccagccagccatatgagtgagcccagaacagcaaagaact

SEQ ID NO: 1646 - DNA, 122 bp, Homo sapiens
  misc_feature (61)..(62): /note="This region represents a CpG dinucleotide"
  misc_feature (61)..(61): /note="Nucleotide may be methylated to form 5-methylcytosine"
cttggcctgggacgccggccccgatcctcggctgccgcggcgcgcccgtgtgtgcgccctcgccctgtctgcacgacggtgcctgccgtgacctcttcgacgcctttgcctgcgcctgcggc

SEQ ID NO: 1647 - DNA, 122 bp, Homo sapiens
  misc_feature (61)..(62): /note="This region represents a CpG dinucleotide"
  misc_feature (61)..(61): /note="Nucleotide may be methylated to form 5-methylcytosine"
tctcaaaaataaataaataaataaaataaaatccattcagtggacattgcctggaagtgacggttaattttgtgagtcaacttgactggcccacagggtgcccaggtatttggctaaacatt

SEQ ID NO: 1648 - DNA, 122 bp, Homo sapiens
  misc_feature (61)..(62): /note="This region represents a CpG dinucleotide"
  misc_feature (61)..(61): /note="Nucleotide may be methylated to form 5-methylcytosine"
tacaaaataattcttttgaagtaggaccggtggcaaccaacacggctccctgctccaggccgggacgcccctctgggaggaacgcgcggccacccttggaaacctgtaagtgatccacggtc

SEQ ID NO: 1649 - DNA, 122 bp, Homo sapiens
  misc_feature (61)..(62): /note="This region represents a CpG dinucleotide"
  misc_feature (61)..(61): /note="Nucleotide may be methylated to form 5-methylcytosine"
ggactcaataaatgtactctgtaatcacttgaatgtaattttatgaatgtgctttgacgacgtagtttgtcagagcagagcaattcctggatatatttcttgcagttcagcagcacttaacc

SEQ ID NO: 1650 - DNA, 122 bp, Homo sapiens
  misc_feature (61)..(62): /note="This region represents a CpG dinucleotide"
  misc_feature (61)..(61): /note="Nucleotide may be methylated to form 5-methylcytosine"
ggtgaccctcctcagccaagagcaaggtgcagcctcgagcagcccagcaccgccgctgcgcgaaggaggcatttccgtttatggctgtttagctccttaaacatttcaagtcatacagaaat

SEQ ID NO: 1651 - DNA, 122 bp, Homo sapiens
  misc_feature (61)..(62): /note="This region represents a CpG dinucleotide"
  misc_feature (61)..(61): /note="Nucleotide may be methylated to form 5-methylcytosine"
gccccatcgtctctgtgggtccccagagaagccatttctgacttgtctcacaggggctgccggaggaactgggaaaagaccacagggagaaggaaacctccagctgaacttagtaacaattc

SEQ ID NO: 1652 - DNA, 122 bp, Homo sapiens
  misc_feature (61)..(62): /note="This region represents a CpG dinucleotide"
  misc_feature (61)..(61): /note="Nucleotide may be methylated to form 5-methylcytosine"
agtaggaagggggggcagacagagagaaaagtcacagttacaatgacaggaacagaaacacggacagtcaccaagggccagacacacagcgggggtcagggctgcaaaccgagaaggcagaa

SEQ ID NO: 1653 - DNA, 122 bp, Homo sapiens
  misc_feature (61)..(62): /note="This region represents a CpG dinucleotide"
  misc_feature (61)..(61): /note="Nucleotide may be methylated to form 5-methylcytosine"
acctcaggtgatccgcccatctcggcctcccaaagtgttgagattacaggcgtgagccaccgcgcccggccgctagcgtgttatcttttctaagcatcagtttccttatctgcaacaccagg

SEQ ID NO: 1654 - DNA, 122 bp, Homo sapiens
  misc_feature (61)..(62): /note="This region represents a CpG dinucleotide"
  misc_feature (61)..(61): /note="Nucleotide may be methylated to form 5-methylcytosine"
agctcaggatgccctttagggggccctctggtgcctgcttcaataccttcttaatgtcatcgtatttggcagggttttctggatggcagatcagatctgacatgtaggtggtggggacttgg

SEQ ID NO: 1655 - DNA, 122 bp, Homo sapiens
  misc_feature (61)..(62): /note="This region represents a CpG dinucleotide"
  misc_feature (61)..(61): /note="Nucleotide may be methylated to form 5-methylcytosine"
atgcaagaggcttggtgcagaagctgaaggcagtgtgtgcaaacactcccattccacacacgccccttcccctccccacatcaggtggtgcctttggagcacttttgtgtaggaaggaattc

SEQ ID NO: 1656 - DNA, 122 bp, Homo sapiens
  misc_feature (61)..(62): /note="This region represents a CpG dinucleotide"
  misc_feature (61)..(61): /note="Nucleotide may be methylated to form 5-methylcytosine"
ttcaagctggctgcagaaatctgcgtaagtatcaaggagcctaatgttaatcccctagaccgtggggaaaatgtctccaggctatgtcaaagaccttcatggcagcccctcccagcacaggc

SEQ ID NO: 1657 - DNA, 122 bp, Homo sapiens
  misc_feature (61)..(62): /note="This region represents a CpG dinucleotide"
  misc_feature (61)..(61): /note="Nucleotide may be methylated to form 5-methylcytosine"
ggcagccgggaagttcgcaggcccctaggaggccaggtgaggccgcgccccagcttgctccggagctgcaggaggcgccctggtctctgcgcttgacatcacccccgccccccgccaacacc

SEQ ID NO: 1658 - DNA, 122 bp, Homo sapiens
  misc_feature (61)..(62): /note="This region represents a CpG dinucleotide"
  misc_feature (61)..(61): /note="Nucleotide may be methylated to form 5-methylcytosine"
gactggaaacgcttcccctatttcttccgtagcggaccgggagagcttactggcgctctgcgaaccggctggaaagaaacaccgagtcactcgtacagactcttggtcgcagaacttggctt

SEQ ID NO: 1659 - DNA, 122 bp, Homo sapiens
  misc_feature (61)..(62): /note="This region represents a CpG dinucleotide"
  misc_feature (61)..(61): /note="Nucleotide may be methylated to form 5-methylcytosine"
gtctcgaactcctggcctcaagtgatctgctcaccttggccttttaaagcactgggattacgggcctgagccactgtgcccagccaacccaaatatttcttgatagatgccagtaagaggac

SEQ ID NO: 1660 - DNA, 122 bp, Homo sapiens
  misc_feature (61)..(62): /note="This region represents a CpG dinucleotide"
  misc_feature (61)..(61): /note="Nucleotide may be methylated to form 5-methylcytosine"
gagggaaggaacattatcttatgcttttaaatctcacagccaatggcatagaggcttatacgtacatgcttcacaaataccttatcaacaaaaaaaaatttttcagtgtcttttcattttag

SEQ ID NO: 1661 - DNA, 122 bp, Homo sapiens
  misc_feature (61)..(62): /note="This region represents a CpG dinucleotide"
  misc_feature (61)..(61): /note="Nucleotide may be methylated to form 5-methylcytosine"
ctggaagtagctgcggggcgcagtgcaggcaggaaaagggctggatgccgggtcaccgcccggccccagctcctggcccgtccccgctcccggtccattcccgccccggccccgccccctcc

SEQ ID NO: 1662 - DNA, 122 bp, Homo sapiens
  misc_feature (61)..(62): /note="This region represents a CpG dinucleotide"
  misc_feature (61)..(61): /note="Nucleotide may be methylated to form 5-methylcytosine"
tcctctcgatgttcagccgcttgtctctctgccagctgagctctgaggtttataggagcacgagatacggaggctgggtgggccaaaaagtagcatttgagctggaaaacggataactgttt

SEQ ID NO: 1663 - DNA, 122 bp, Homo sapiens
  misc_feature (61)..(62): /note="This region represents a CpG dinucleotide"
  misc_feature (61)..(61): /note="Nucleotide may be methylated to form 5-methylcytosine"
gcacgggaggacacaggcacaggggggacacacacagcagggactcatgcacaaggggaacgcacgcacagggaggacacaggcacggaggggacacaggcacggggggacgcatgcacggg

SEQ ID NO: 1664 - DNA, 122 bp, Homo sapiens
  misc_feature (61)..(62): /note="This region represents a CpG dinucleotide"
  misc_feature (61)..(61): /note="Nucleotide may be methylated to form 5-methylcytosine"
atttatggactttacattggggctcaaattatagttatatatgaggatctatcgagcacccgattctgtggctgttcggggcgccactatgtaacctgccatgatccctggtggactgaaca

SEQ ID NO: 1665 - DNA, 122 bp, Homo sapiens
  misc_feature (61)..(62): /note="This region represents a CpG dinucleotide"
  misc_feature (61)..(61): /note="Nucleotide may be methylated to form 5-methylcytosine"
ccccagcccgaggggcaacttaaaacatggcgccccgggcgggggatttgtgcaaattggcggagaagggacgcggggaccgagtcgccccttcggccagggatcccagggaggcccccagg

SEQ ID NO: 1666 - DNA, 122 bp, Homo sapiens
  misc_feature (61)..(62): /note="This region represents a CpG dinucleotide"
  misc_feature (61)..(61): /note="Nucleotide may be methylated to form 5-methylcytosine"
tagcgtgtagccttttcaacttggcttctttcacttagcagtatgcatctgaggttcttccgtgtcttttcatggcttgatagctcatttcattttagcactgaataatattccattgtctg

SEQ ID NO: 1667 - DNA, 122 bp, Homo sapiens
  misc_feature (61)..(62): /note="This region represents a CpG dinucleotide"
  misc_feature (61)..(61): /note="Nucleotide may be methylated to form 5-methylcytosine"
tccggcccagcccgtcccgccccgtaccgtaccaggccccgcccccgcccgggccgcccccgcccccgtccccgcccccacagcccgcagacccccaacggtcggcgggcttctaggcctcg

SEQ ID NO: 1668 - DNA, 122 bp, Homo sapiens
  misc_feature (61)..(62): /note="This region represents a CpG dinucleotide"
  misc_feature (61)..(61): /note="Nucleotide may be methylated to form 5-methylcytosine"
gatgggttgcttttgcttctctcattttctcctgctgctgccaatgtaagaagtacctttcgcctcccaccatgattctgaggcctccccagccatgtggaactgtaagtccaattaaacct

SEQ ID NO: 1669 - DNA, 122 bp, Homo sapiens
  misc_feature (61)..(62): /note="This region represents a CpG dinucleotide"
  misc_feature (61)..(61): /note="Nucleotide may be methylated to form 5-methylcytosine"
aggatttggggggccaagggtaatagctaaagggtatgggttttctttttctttttctgtcgcacaggctggagggcagcagtgcaaccacagctcactgcaccctctaacttctgggttca

SEQ ID NO: 1670 - DNA, 122 bp, Homo sapiens
  misc_feature (61)..(62): /note="This region represents a CpG dinucleotide"
  misc_feature (61)..(61): /note="Nucleotide may be methylated to form 5-methylcytosine"
ctagaatctgttgtaacatcacttcacaagatttgttgtgagtgcttgagtcacagttggcgctcaagaaagatgcgttctccttttaaacacaaaaatgtccattgatacagcagattccg

SEQ ID NO: 1671 - DNA, 122 bp, Homo sapiens
  misc_feature (61)..(62): /note="This region represents a CpG dinucleotide"
  misc_feature (61)..(61): /note="Nucleotide may be methylated to form 5-methylcytosine"
cctcttaattggacttacagttccacattgctggggaggcctcagaatcacggtgggaggcgaaaggctttctcacatggcagtggcaagagaaaataaggaagatgcaaaagcggagcccc

SEQ ID NO: 1672 - DNA, 122 bp, Homo sapiens
  misc_feature (61)..(62): /note="This region represents a CpG dinucleotide"
  misc_feature (61)..(61): /note="Nucleotide may be methylated to form 5-methylcytosine"
ctcaacctggggagtcagatctgatacagttagtggctgcaactgctctactcacttctgcgcgtgttctcagaggaaagggctgtgtggtgtgttgctgccagaattccagagatgttctc

SEQ ID NO: 1673 - DNA, 122 bp, Homo sapiens
  misc_feature (61)..(62): /note="This region represents a CpG dinucleotide"
  misc_feature (61)..(61): /note="Nucleotide may be methylated to form 5-methylcytosine"
cagcagtgacagaacctcaagggaatggcctcctagggggtcatgatccatgtgagggcacggaatggagctaagcacacagtgtcacttcatactcacagcaccctggctactgcctactg

SEQ ID NO: 1674 - DNA, 122 bp, Homo sapiens
  misc_feature (61)..(62): /note="This region represents a CpG dinucleotide"
  misc_feature (61)..(61): /note="Nucleotide may be methylated to form 5-methylcytosine"
tttacagctttaacaagcaataaaaaaagacctgaaagtacttggatgtgtacagaaccacgcagaatcagcacacataatgaaaagggaaatattagtatttagagtaaggatcagcctat

SEQ ID NO: 1675 - DNA, 122 bp, Homo sapiens
  misc_feature (61)..(62): /note="This region represents a CpG dinucleotide"
  misc_feature (61)..(61): /note="Nucleotide may be methylated to form 5-methylcytosine"
aatagtgccttcagcttctaatcctcctgagtctttgagaatctaatttcctttcatctgcggcactaggtaaagtcatgaagagctaatttgggtgaagtcctggtgacatcataaccaca

SEQ ID NO: 1676 - DNA, 122 bp, Homo sapiens
  misc_feature (61)..(62): /note="This region represents a CpG dinucleotide"
  misc_feature (61)..(61): /note="Nucleotide may be methylated to form 5-methylcytosine"
attttggaaaatacctggcattattttgcaaaacttgacaagccaacaactccactcttacgcataaagtctcttgcatatgtgtaccaggggacagtcaaggatgttttgagtgtactgtt

SEQ ID NO: 1677 - DNA, 122 bp, Homo sapiens
  misc_feature (61)..(62): /note="This region represents a CpG dinucleotide"
  misc_feature (61)..(61): /note="Nucleotide may be methylated to form 5-methylcytosine"
tcattttccagaaagaagcatgttgtttcatgctgcagtgctttaacacactttttttctcgtttttaaaagatgccttttcctattttatcaactttgtgagatcaggcttagtcttcaaa

SEQ ID NO: 1678 - DNA, 122 bp, Homo sapiens
  misc_feature (61)..(62): /note="This region represents a CpG dinucleotide"
  misc_feature (61)..(61): /note="Nucleotide may be methylated to form 5-methylcytosine"
taacagtcaactctgacaatcccacagccaacatcataatgaattgacaaaagctggaagcgttcctcttgagaagcggaacaagacaaggatgcccactcttgccactcctactcaatata

SEQ ID NO: 1679 - DNA, 122 bp, Homo sapiens
  misc_feature (61)..(62): /note="This region represents a CpG dinucleotide"
  misc_feature (61)..(61): /note="Nucleotide may be methylated to form 5-methylcytosine"
cgatcccgggccgactccccgatcctcggtcgctgccctggccgctccgaggagtcttcgcgccccgctgccccacgctgagggcatcgaaatccagcgtcttgctctcgaaggcgccctcc

SEQ ID NO: 1680 - DNA, 122 bp, Homo sapiens
  misc_feature (61)..(62): /note="This region represents a CpG dinucleotide"
  misc_feature (61)..(61): /note="Nucleotide may be methylated to form 5-methylcytosine"
agaaaaatttatttcaagcctagaaacccataccaatcatagtaaagacattttcaaacacgtaagactcagaaagtgagcctcaatcagaataaatcacttaagactattaaatatatttc

SEQ ID NO: 1681 - DNA, 122 bp, Homo sapiens
  misc_feature (61)..(62): /note="This region represents a CpG dinucleotide"
  misc_feature (61)..(61): /note="Nucleotide may be methylated to form 5-methylcytosine"
gtaaaataaaataacttgtatgtcccttcacaagccacagtcagaacactgtcacaatctcgacctttgctccccaaaccctattttgcaaaccagatgctatttctttggacattacaggc

SEQ ID NO: 1682 - DNA, 122 bp, Homo sapiens
  misc_feature (61)..(62): /note="This region represents a CpG dinucleotide"
  misc_feature (61)..(61): /note="Nucleotide may be methylated to form 5-methylcytosine"
gaaatgaaaaagtcaggccggattctcaggctttctttgccacctgcttaagaaagtgcccgttttactgaacgcacaacacaaaagtttccatcttcttcctcatatggaaattttatgtg

SEQ ID NO: 1683 - DNA, 122 bp, Homo sapiens
  misc_feature (61)..(62): /note="This region represents a CpG dinucleotide"
  misc_feature (61)..(61): /note="Nucleotide may be methylated to form 5-methylcytosine"
cagcagttcccaaatctacctggccagttttcttaaaggctctctcaggacatctcctagcgcaaagctcacagcgtgaagtactattgtagacaataggggctgggcaccacagctcatgc

SEQ ID NO: 1684 - DNA, 122 bp, Homo sapiens
  misc_feature (61)..(62): /note="This region represents a CpG dinucleotide"
  misc_feature (61)..(61): /note="Nucleotide may be methylated to form 5-methylcytosine"
aggaattggagaaaaaagtgagtagttcacataaataaaacagttggtgttagtttcatccggttgagccaagcatttcagggacagctgagaagagcagaaactgaagaaaggaagagatt

SEQ ID NO: 1685 - DNA, 122 bp, Homo sapiens
  misc_feature (61)..(62): /note="This region represents a CpG dinucleotide"
  misc_feature (61)..(61): /note="Nucleotide may be methylated to form 5-methylcytosine"
gaacctctattttgcatcatatcatttctgtccataattgtactgaaatagaaaagtgaccgctcttgctcttggtaaaatatagagtggtcagtagccttatgcacctaattcaaaaggtg

SEQ ID NO: 1686 - DNA, 122 bp, Homo sapiens
  misc_feature (61)..(62): /note="This region represents a CpG dinucleotide"
  misc_feature (61)..(61): /note="Nucleotide may be methylated to form 5-methylcytosine"
gtccccctccccttgtggagttgtccggaccgaaccaatgttcctcttacacatatgggtcgatgcctcacgtctccctaacgtgtaaaactgagctgtgcccggccaccttgggcacacgt

SEQ ID NO: 1687 - DNA, 122 bp, Homo sapiens
  misc_feature (61)..(62): /note="This region represents a CpG dinucleotide"
  misc_feature (61)..(61): /note="Nucleotide may be methylated to form 5-methylcytosine"
tattcgcatacaggcaaacattcataatctaaaggacacctaaaaatagatgtaagcgagcggaggttttctttgctggccactgtttatcgcatcagcagaggaaagatctgaatgactca

SEQ ID NO: 1688 - DNA, 122 bp, Homo sapiens
  misc_feature (61)..(62): /note="This region represents a CpG dinucleotide"
  misc_feature (61)..(61): /note="Nucleotide may be methylated to form 5-methylcytosine"
ttctgtaatacaacaaagcaacggaatccttgggattctggccatcccggaggtacctcccgggtccgtggcggggcaagccctttttccacgacgcctcccacccgcctcgtctgctttgg

SEQ ID NO: 1689 - DNA, 122 bp, Homo sapiens
  misc_feature (61)..(62): /note="This region represents a CpG dinucleotide"
  misc_feature (61)..(61): /note="Nucleotide may be methylated to form 5-methylcytosine"
tcaggtgatccacccccgccctcggcctcccaaagtgctggcactacaggcatgagccaccgctcctggccgggtttgcctacattttggagatgctgcacaccatgtccctcttttcaaga

SEQ ID NO: 1690 - DNA, 122 bp, Homo sapiens
  misc_feature (61)..(62): /note="This region represents a CpG dinucleotide"
  misc_feature (61)..(61): /note="Nucleotide may be methylated to form 5-methylcytosine"
acaaattgcgctgcattatgtctgaatcatgttctgtgacaagtcatattacaagtggtacggttatattatgcaatgtatgtgataatgtgtgagaacaaacgaagcaggctacgtaaaag

SEQ ID NO: 1691 - DNA, 122 bp, Homo sapiens
  misc_feature (61)..(62): /note="This region represents a CpG dinucleotide"
  misc_feature (61)..(61): /note="Nucleotide may be methylated to form 5-methylcytosine"
ggttcatctgcaagttttttcaaattgttgcaaatctccaaaaaaattttcaagtgaactcgtgcagttcaaacttgtgctgtgcaagagtcaactgtatttgcttattttctcaaaaagga

SEQ ID NO: 1692 - DNA, 122 bp, Homo sapiens
  misc_feature (61)..(62): /note="This region represents a CpG dinucleotide"
  misc_feature (61)..(61): /note="Nucleotide may be methylated to form 5-methylcytosine"
aggggtgtggatattccaacaggatgcctttctgttttgcagcaaaatttaccgagtttccgcggaacgtgacggcgaccgaggggcagaatgtggagatgtcctgcgccttccagagcggc

SEQ ID NO: 1693 - DNA, 122 bp, Homo sapiens
  misc_feature (61)..(62): /note="This region represents a CpG dinucleotide"
  misc_feature (61)..(61): /note="Nucleotide may be methylated to form 5-methylcytosine"
atccttctccaccaccacaatactcctgttcattcttctcatcaaacaaggccagttttgcgagagttttgataggaaatcattacacatccacctcacagccatgatttggcttttcatga

SEQ ID NO: 1694 - DNA, 122 bp, Homo sapiens
  misc_feature (61)..(62): /note="This region represents a CpG dinucleotide"
  misc_feature (61)..(61): /note="Nucleotide may be methylated to form 5-methylcytosine"
ctacaatcacagtctccttcacaatttatggtcctgaagaaatactagagaacaccttaccgttcaggattgtgggaagagaaaccagatcatagaaatcaacaacaataatgtactactta

SEQ ID NO: 1695 - DNA, 122 bp, Homo sapiens
  misc_feature (61)..(62): /note="This region represents a CpG dinucleotide"
  misc_feature (61)..(61): /note="Nucleotide may be methylated to form 5-methylcytosine"
ctttatgatgtctgcaaaataaaaggggaatgagtgttattataccaatttttatggacacgggaacctgagcatagtctctacatgagttgccaaagtcatttttctgacacaatccacaa

SEQ ID NO: 1696 - DNA, 122 bp, Homo sapiens
  misc_feature (61)..(62): /note="This region represents a CpG dinucleotide"
  misc_feature (61)..(61): /note="Nucleotide may be methylated to form 5-methylcytosine"
caacaccttcatcccctcaacccccgtttctgaccttgcagattccctccagagcaagctcgtctaactcgtggcccgcaggccacacggagcccaggaggacttgaatgcggcccaacaca

SEQ ID NO: 1697 - DNA, 122 bp, Homo sapiens
  misc_feature (61)..(62): /note="This region represents a CpG dinucleotide"
  misc_feature (61)..(61): /note="Nucleotide may be methylated to form 5-methylcytosine"
aagccacagactgtgtactgtgcaattcctggggcggcattttcataaatatgtgggtggcgccccctggaggtgtgcaatgtacaacttgcataaatggtaagtgatggtatcccaaagtc

SEQ ID NO: 1698 - DNA, 122 bp, Homo sapiens
  misc_feature (61)..(62): /note="This region represents a CpG dinucleotide"
  misc_feature (61)..(61): /note="Nucleotide may be methylated to form 5-methylcytosine"
atcaacctaaaaagcctgttggagaaatgcaggtggaaaccacaatgcagtgtcacttcacgtcctaacgggggcatcttttcatgtttattggccatttatttatcttctttggagaaatg

SEQ ID NO: 1699 - DNA, 122 bp, Homo sapiens
  misc_feature (61)..(62): /note="This region represents a CpG dinucleotide"
  misc_feature (61)..(61): /note="Nucleotide may be methylated to form 5-methylcytosine"
gtgctatggccttgattcctcaggatgatccagtaaccaactgttagaggctcatgttgacgaaaaaagccaaactccgtaaaatgtttgaagaggtttattctgagcacaaggtgaggacc

SEQ ID NO: 1700 - DNA, 122 bp, Homo sapiens
  misc_feature (61)..(62): /note="This region represents a CpG dinucleotide"
  misc_feature (61)..(61): /note="Nucleotide may be methylated to form 5-methylcytosine"
cctcacccttttcttgatgaacttgagggcctgtttgtcctttgagaccttgaacaactccgtggtgtgatactctacgtggcgaagcaacacacctctcagatcatgtcccacactaactt

SEQ ID NO: 1701 - DNA, 122 bp, Homo sapiens
  misc_feature (61)..(62): /note="This region represents a CpG dinucleotide"
  misc_feature (61)..(61): /note="Nucleotide may be methylated to form 5-methylcytosine"
catttttgcctaattagataccttcttcttaacataagcctaacccaatgaagttttctccgtgatgcaaagttttaaagtttcatggtcacctttgcaacctaattagtaaacatttaacc

SEQ ID NO: 1702 - DNA, 122 bp, Homo sapiens
  misc_feature (61)..(62): /note="This region represents a CpG dinucleotide"
  misc_feature (61)..(61): /note="Nucleotide may be methylated to form 5-methylcytosine"
ctggcctctcgggaactacaagtcccagggggcctggcggtgggcggcgggcggaagaggcggggtcggcgccgcgaggccggaagtggccgtggaggcggaagtggcgcggccgcggaggg

SEQ ID NO: 1703 - DNA, 122 bp, Homo sapiens
  misc_feature (61)..(62): /note="This region represents a CpG dinucleotide"
  misc_feature (61)..(61): /note="Nucleotide may be methylated to form 5-methylcytosine"
aggatactgttgaaatagctgcaaaagtcagtggccaataagaccctaaaaaatgagatgcgggccaagctggttaagaccaactgtacccagcatggtgctggatttgacctaggtttctc

SEQ ID NO: 1704 - DNA, 122 bp, Homo sapiens
  misc_feature (61)..(62): /note="This region represents a CpG dinucleotide"
  misc_feature (61)..(61): /note="Nucleotide may be methylated to form 5-methylcytosine"
tgtccctgcagcagctccttcggctctctgggcctcagtcttcctcatctataaaataggcgtgctgacactttccccgtagtactgtcttaagaactggataaagcacctgctttgaaggt

SEQ ID NO: 1705 - DNA, 122 bp, Homo sapiens
  misc_feature (61)..(62): /note="This region represents a CpG dinucleotide"
  misc_feature (61)..(61): /note="Nucleotide may be methylated to form 5-methylcytosine"
caccgctcctgccactgcagtgctcgagccccgtgcaggggagcttgcgggaggatcgaccgacagacggacgcacgccgaggcactgcgcccccagccccgcgccggtgccaccgcagccc

SEQ ID NO: 1706 - DNA, 122 bp, Homo sapiens
  misc_feature (61)..(62): /note="This region represents a CpG dinucleotide"
  misc_feature (61)..(61): /note="Nucleotide may be methylated to form 5-methylcytosine"
tgaggaaactaaagctcagaaagattaagagattatccaaggtcacacagcaagtggcagcgccagcaaacacaggtatctgacaaatcttgtgccctttccttggaggttagagaaataag

SEQ ID NO: 1707 - DNA, 122 bp, Homo sapiens
  misc_feature (61)..(62): /note="This region represents a CpG dinucleotide"
  misc_feature (61)..(61): /note="Nucleotide may be methylated to form 5-methylcytosine"
aattgcagaatacatggttctgcttttgtgtgatttaaagcaggagtagtaaatacctggcgtggaggtagccactagaaacatggcatccatttcagtagagccttgatgtgaggtcttct

SEQ ID NO: 1708 - DNA, 122 bp, Homo sapiens
  misc_feature (61)..(62): /note="This region represents a CpG dinucleotide"
  misc_feature (61)..(61): /note="Nucleotide may be methylated to form 5-methylcytosine"
gccagaaaacaagcagtaactgctatgcctgacaaaactgttgctgcacacatctgtactcgtcaatcaacaaaacctgatgcaaaaaacagaaaaggggtgatgtaggagatggtcaggtt

SEQ ID NO: 1709 - DNA, 122 bp, Homo sapiens
  misc_feature (61)..(62): /note="This region represents a CpG dinucleotide"
  misc_feature (61)..(61): /note="Nucleotide may be methylated to form 5-methylcytosine"
atcacttgcagaggcaactggtggcagcatctgactttcacttgcagtttgactacatcccgtggttggtgcttgtaaagcaatctgagaattatcaacatcctccttggtatgtgctgtag

SEQ ID NO: 1710 - DNA, 122 bp, Homo sapiens
  misc_feature (61)..(62): /note="This region represents a CpG dinucleotide"
  misc_feature (61)..(61): /note="Nucleotide may be methylated to form 5-methylcytosine"
ccttgggctgaagggctcaaaccccaggctgctacttcccttgagaattgctcacccaggcgggagggctgctccttccacacagcacagcctgtaaacgtcactctctgtcatcgtttata

SEQ ID NO: 1711 - DNA, 122 bp, Homo sapiens
  misc_feature (61)..(62): /note="This region represents a CpG dinucleotide"
  misc_feature (61)..(61): /note="Nucleotide may be methylated to form 5-methylcytosine"
agtatagatgtacttacattctacaaaaatagaacaactaagatagcaaaatcaaaggcccgcagacaacatctaaagcaaaatgaggtgacagaatgtatgtgcataaatcatacatggct

SEQ ID NO: 1712 - DNA, 122 bp, Homo sapiens
  misc_feature (61)..(62): /note="This region represents a CpG dinucleotide"
  misc_feature (61)..(61): /note="Nucleotide may be methylated to form 5-methylcytosine"
ataagttataaattgcacactgttctgagtagtgtgatgaaatgtcacaccatcctactccgtcctgcccaggatgtgaatctgaatcattcctttgtccagcatctccatgctgtatatgc

SEQ ID NO: 1713 - DNA, 122 bp, Homo sapiens
  misc_feature (61)..(62): /note="This region represents a CpG dinucleotide"
  misc_feature (61)..(61): /note="Nucleotide may be methylated to form 5-methylcytosine"
cagggcctcagcgtcatcggggacgggcgccgaggggagcgcgcaccagcgacccgggcgcggactggggcctgcagggcgtgactggctgccccccaggactccatctccttcataaacac

SEQ ID NO: 1714 - DNA, 122 bp, Homo sapiens
  misc_feature (61)..(62): /note="This region represents a CpG dinucleotide"
  misc_feature (61)..(61): /note="Nucleotide may be methylated to form 5-methylcytosine"
gctgcctgaactcctcagactatataaaaaaggagcaaacccttttttaagcatgacattcgatcattaacaggatcatagtctgagagctggatgcaaataaaggactctataatgagaaa

SEQ ID NO: 1715 - DNA, 122 bp, Homo sapiens
  misc_feature (61)..(62): /note="This region represents a CpG dinucleotide"
  misc_feature (61)..(61): /note="Nucleotide may be methylated to form 5-methylcytosine"
gtcatggtttcctctgcctcctaaaaccctcatttatgagtcagttctgcctcttactagcgtgtgaccctcggcaagctgcttaatcactttgagcctgttcccttgctttgtaaaaataa

SEQ ID NO: 1716 - DNA, 122 bp, Homo sapiens
  misc_feature (61)..(62): /note="This region represents a CpG dinucleotide"
  misc_feature (61)..(61): /note="Nucleotide may be methylated to form 5-methylcytosine"
attatcacaagaacagcatgggggaactgcccccatgatccaattacctccacctggtcccgcccttgacccgtgggaattatggggattatattcaaggtgagatttggatggggacacag

SEQ ID NO: 1717 - DNA, 122 bp, Homo sapiens
  misc_feature (61)..(62): /note="This region represents a CpG dinucleotide"
  misc_feature (61)..(61): /note="Nucleotide may be methylated to form 5-methylcytosine"
tctcaagaccctggctctgtgggcgactgcacgtgtggcggtgaccatcaaggtttctgacggatcttgtcaagagacttaagtcatcgtcacagtatttcagacgaacgcagtgatgtggc

SEQ ID NO: 1718 - DNA, 122 bp, Homo sapiens
  misc_feature (61)..(62): /note="This region represents a CpG dinucleotide"
  misc_feature (61)..(61): /note="Nucleotide may be methylated to form 5-methylcytosine"
cagtcattaatttttttctatttttccccaagctgtggcaaccaacaaaaaacacaatgacgttctagtgacctagatataattatgttcctttcagaagtaaagttttttaaacatagtaa

SEQ ID NO: 1719 - DNA, 122 bp, Homo sapiens
  misc_feature (61)..(62): /note="This region represents a CpG dinucleotide"
  misc_feature (61)..(61): /note="Nucleotide may be methylated to form 5-methylcytosine"
gacaccctcaaaacataaatacataaaataaaatttaaaaacacatattgacccacaaaacgtaattatttgttaagaatggccatttggtgacaagcagcccaaggaggcaaatttactct

SEQ ID NO: 1720 - DNA, 122 bp, Homo sapiens
  misc_feature (61)..(62): /note="This region represents a CpG dinucleotide"
  misc_feature (61)..(61): /note="Nucleotide may be methylated to form 5-methylcytosine"
tactggggagaataaatcacatgacctcactcagatgcaaaggacactgggaaatgtagtcgctgtctgaacagttgtgttcattccagtaataatctcccaatgaccaaggaagaagaacc

SEQ ID NO: 1721 - DNA, 122 bp, Homo sapiens
  misc_feature (61)..(62): /note="This region represents a CpG dinucleotide"
  misc_feature (61)..(61): /note="Nucleotide may be methylated to form 5-methylcytosine"
tgcaataaattagtatgaacaataggtgtggaaagtggggaaagggcatcgggcaggaaacgcctaatcccaggttggcatgaccttgggcaaggtgccagtgtctcaatgaccttgatggt

SEQ ID NO: 1722 - DNA, 122 bp, Homo sapiens
  misc_feature (61)..(62): /note="This region represents a CpG dinucleotide"
  misc_feature (61)..(61): /note="Nucleotide may be methylated to form 5-methylcytosine"
ctcaggtgatctgcctgccttggcctcccaaagtgctgggattacaggcgtgagccaccacgcctggccacagtttattttcctaagtgccaaggttaagcaagtcaaggaaagactgaggg

SEQ ID NO: 1723 - DNA, 122 bp, Homo sapiens
  misc_feature (61)..(62): /note="This region represents a CpG dinucleotide"
  misc_feature (61)..(61): /note="Nucleotide may be methylated to form 5-methylcytosine"
gcgcgcgggcggggccgggggcgcggcgaggctcgggttggggcggggcgggggcgggggcggggccggacccggggaagccgcccgcccgcggggacgtccgcaccgcgagggttaaggcc

SEQ ID NO: 1724 - DNA, 122 bp, Homo sapiens
  misc_feature (61)..(62): /note="This region represents a CpG dinucleotide"
  misc_feature (61)..(61): /note="Nucleotide may be methylated to form 5-methylcytosine"
ttagccgggcatggtggtgcattcctgtaatcaatctcagctactcaggaggctgacgtacgagaatcactttagcccagaaggcggtgcttgcaatgagccaagattgagtcactgcactc

SEQ ID NO: 1725 - DNA, 122 bp, Homo sapiens
  misc_feature (61)..(62): /note="This region represents a CpG dinucleotide"
  misc_feature (61)..(61): /note="Nucleotide may be methylated to form 5-methylcytosine"
gcacggagggaggggcgggcctccaggggacttcagcgggagccgggcctggggcggtgccgcacttgcacacggagtgtggggggccaggcctgggaccaggagctggggccgggcttcgg

SEQ ID NO: 1726 - DNA, 122 bp, Homo sapiens
  misc_feature (61)..(62): /note="This region represents a CpG dinucleotide"
  misc_feature (61)..(61): /note="Nucleotide may be methylated to form 5-methylcytosine"
aggtgtgcacagaaactgtaatttgaataaagatcaccattaaagttcagtgtatttgtgcgtgtgtttctgtgtttggagttttgttgttgttttgtacagaaagaaacttaaaaatctgt

SEQ ID NO: 1727 - DNA, 122 bp, Homo sapiens
  misc_feature (61)..(62): /note="This region represents a CpG dinucleotide"
  misc_feature (61)..(61): /note="Nucleotide may be methylated to form 5-methylcytosine"
ttcagatgttaaacactttctcatgcacaaaccacttaagcagcatagacacagagtccacgtcagggaatgttacattcagtataggcacctattatttggtaactcagaagtaggaaaat

SEQ ID NO: 1728 - DNA, 122 bp, Homo sapiens
  misc_feature (61)..(62): /note="This region represents a CpG dinucleotide"
  misc_feature (61)..(61): /note="Nucleotide may be methylated to form 5-methylcytosine"
ccttttagaaagaggcaggagagctagctcatttgcttgccaccttgggaggatacaacacgaagttggcagtttgcaacctggaagagagtcctcgccagcacctgaccatgctggcaccc

SEQ ID NO: 1729 - DNA, 122 bp, Homo sapiens
  misc_feature (61)..(62): /note="This region represents a CpG dinucleotide"
  misc_feature (61)..(61): /note="Nucleotide may be methylated to form 5-methylcytosine"
atgcacttcaagtcctgtgtatcccacaaagacttgctcctttctaaaggctatggttcacgttcaacagaatagcagcaaccgccataagcctgagggctggctagtctttaatattctgc

SEQ ID NO: 1730 - DNA, 122 bp, Homo sapiens
  misc_feature (61)..(62): /note="This region represents a CpG dinucleotide"
  misc_feature (61)..(61): /note="Nucleotide may be methylated to form 5-methylcytosine"
acatggctcaccctgtaaatccaacactttgggtggctgaggcaggaggatcacttgaaccgaggagtttgaaaccagcctcagcaacatagtgagaccctgtctcaactaaaaaaatttaa

SEQ ID NO: 1731 - DNA, 122 bp, Homo sapiens
  misc_feature (61)..(62): /note="This region represents a CpG dinucleotide"
  misc_feature (61)..(61): /note="Nucleotide may be methylated to form 5-methylcytosine"
ccaggcctccagggcgcccccaccacccgcacccctcccgcaccgaggtgtccaggcccgcgcagccgggtgacggcaccaggactggacccccgatccgaagcccaccatccccctctacc

SEQ ID NO: 1732 - DNA, 122 bp, Homo sapiens
  misc_feature (61)..(62): /note="This region represents a CpG dinucleotide"
  misc_feature (61)..(61): /note="Nucleotide may be methylated to form 5-methylcytosine"
aggcaggattggactccatggcctctgggaggcgggcatgagcatggcagatgtccccctcgccaatatctccccctcgccaagagctccccctcgccaagatctcctcttgcctatgttca

SEQ ID NO: 1733 - DNA, 122 bp, Homo sapiens
  misc_feature (61)..(62): /note="This region represents a CpG dinucleotide"
  misc_feature (61)..(61): /note="Nucleotide may be methylated to form 5-methylcytosine"
ttggacttttcctcccttcatcttctttgttataatctggaagctctaagaaaacattagcgttatcccgcttgttcctgtgcctgagaaatgaatcccctgtgagtccccccatccactct

SEQ ID NO: 1734 - DNA, 122 bp, Homo sapiens
  misc_feature (61)..(62): /note="This region represents a CpG dinucleotide"
  misc_feature (61)..(61): /note="Nucleotide may be methylated to form 5-methylcytosine"
tgctctattagctctgtgtataatacgccaaatttgcagaccagtcaataaagaattgtacgagcccctattgtgtgtgctggcaagagggagatgactgacacttgctttcaagtttccca

SEQ ID NO: 1735 - DNA, 122 bp, Homo sapiens
  misc_feature (61)..(62): /note="This region represents a CpG dinucleotide"
  misc_feature (61)..(61): /note="Nucleotide may be methylated to form 5-methylcytosine"
ggggtgccattctgatgaaattttgagcggcactgattagcccagttatttcctctgttacgcaaggacaaagtcctggcattttttccactgggtggggcactgcattgtaaggtcctttc

SEQ ID NO: 1736 - DNA, 122 bp, Homo sapiens
  misc_feature (61)..(62): /note="This region represents a CpG dinucleotide"
  misc_feature (61)..(61): /note="Nucleotide may be methylated to form 5-methylcytosine"
ctccgcagtccaccacacagccggccacagtgcgctctcttccaattttaacgaatggtacgtttaaaatcagaaacaaaacatcgaacaaaaccctatttaagagactgatcacacacgta

SEQ ID NO: 1737 - DNA, 122 bp, Homo sapiens
  misc_feature (61)..(62): /note="This region represents a CpG dinucleotide"
  misc_feature (61)..(61): /note="Nucleotide may be methylated to form 5-methylcytosine"
ccaggagcagagtgcagaggagaatgagtcagagttgtgtcttcaaaaattacgtaattgcgatttgctaagagtttactttctgtttgggaaattggaaaagagaaagaaatcttactttt

SEQ ID NO: 1738 - DNA, 122 bp, Homo sapiens
  misc_feature (61)..(62): /note="This region represents a CpG dinucleotide"
  misc_feature (61)..(61): /note="Nucleotide may be methylated to form 5-methylcytosine"
atggatgttatgcatggactcagcaacatggactctcactcaccaaggctgacctggctacggccatcactgactgcccaatttgccagcagcagagaccatcagcgagccctcaatatggc

SEQ ID NO: 1739 - DNA, 122 bp, Homo sapiens
  misc_feature (61)..(62): /note="This region represents a CpG dinucleotide"
  misc_feature (61)..(61): /note="Nucleotide may be methylated to form 5-methylcytosine"
agcatcaaacgcttcctacccagcctccgagtctttgcactctgttccctctgcctacgtcgcgttccgcctaagttttgcgtacttcttgttattcaggtctcagctcagatgtcacctcc

SEQ ID NO: 1740 - DNA, 122 bp, Homo sapiens
  misc_feature (61)..(62): /note="This region represents a CpG dinucleotide"
  misc_feature (61)..(61): /note="Nucleotide may be methylated to form 5-methylcytosine"
taggaaaatctcagtgcttgagggtgttttgtctgctgtaggttcaagaacatgaagactcgggtgactcagaagtggagaatgaagcaaaaggtaattttccacctcaaaagaagccagtt

SEQ ID NO: 1741 - DNA, 122 bp, Homo sapiens
  misc_feature (61)..(62): /note="This region represents a CpG dinucleotide"
  misc_feature (61)..(61): /note="Nucleotide may be methylated to form 5-methylcytosine"
aaaaattgcacttacataaatagataaggcatattatttgtattatctgctgacaacatccgtgatgtgtgcatgtgtgtgctgcgtatgcacagagcttcctcactataatttcaggagct

SEQ ID NO: 1742 - DNA, 122 bp, Homo sapiens
  misc_feature (61)..(62): /note="This region represents a CpG dinucleotide"
  misc_feature (61)..(61): /note="Nucleotide may be methylated to form 5-methylcytosine"
ggaagttgcacttgaaatgcaggtcagaacaatgggatacgctggtcctgctgtcccaggcgggggagtcacgggagggctcgagtgccacaccacccacacgtcagccaccatgtgggttc

SEQ ID NO: 1743 - DNA, 122 bp, Homo sapiens
  misc_feature (61)..(62): /note="This region represents a CpG dinucleotide"
  misc_feature (61)..(61): /note="Nucleotide may be methylated to form 5-methylcytosine"
ctgcagtctgtgttcaacagaggtcttcttcttgagggttaggagaagtaagaaagcaaacgtaaaaacgggtgagtcaagagcaagtttttgccatgcaccttggcccctcccaccaccaa

SEQ ID NO: 1744 - DNA, 122 bp, Homo sapiens
  misc_feature (61)..(62): /note="This region represents a CpG dinucleotide"
  misc_feature (61)..(61): /note="Nucleotide may be methylated to form 5-methylcytosine"
taagattcttgctaatcagaaacatgttgtctatattaattaaatgaagacaaaacagaacgcttgtgttaatgcacctgagtctatggaaagaatgaatctatgaaagttcagaacaatat

SEQ ID NO: 1745 - DNA, 122 bp, Homo sapiens
  misc_feature (61)..(62): /note="This region represents a CpG dinucleotide"
  misc_feature (61)..(61): /note="Nucleotide may be methylated to form 5-methylcytosine"
aggggctcccacagccatagaggttgtcaaacttgctcttggtggcggagtcattgacatcgatggcaggcaccttcagaatcccattgaccatcatcttgtacaggttgtggaccccgatt

SEQ ID NO: 1746 - DNA, 122 bp, Homo sapiens
  misc_feature (61)..(62): /note="This region represents a CpG dinucleotide"
  misc_feature (61)..(61): /note="Nucleotide may be methylated to form 5-methylcytosine"
acccttctcctgttatttaggatttctgacaaagctggcttgagattggtcacttagagccgactgtctcctctgccttttgtttttcagcttcagagacagatccaatatagtcccaggga

SEQ ID NO: 1747 - DNA, 122 bp, Homo sapiens
  misc_feature (61)..(62): /note="This region represents a CpG dinucleotide"
  misc_feature (61)..(61): /note="Nucleotide may be methylated to form 5-methylcytosine"
tgcacttcccctgtgagccagcaagtctgcaggctggagaaaatgcagcaggtgcacacacgctgccgagtgcacatcactccgcattctagcactgttagaataatgagaaactgggaaca

SEQ ID NO: 1748 - DNA, 122 bp, Homo sapiens
  misc_feature (61)..(62): /note="This region represents a CpG dinucleotide"
  misc_feature (61)..(61): /note="Nucleotide may be methylated to form 5-methylcytosine"
gcaggacctgccccggcgttggggtgtggggtcccctggcctggagcgggctcgtcctggcgggcctggatccaagcacagtctcagcttttggagccagcagcagccgggccgaattcagt

SEQ ID NO: 1749 - DNA, 122 bp, Homo sapiens
  misc_feature (61)..(62): /note="This region represents a CpG dinucleotide"
  misc_feature (61)..(61): /note="Nucleotide may be methylated to form 5-methylcytosine"
ttacaatccctctcctacacactgtttcccgctccatccatcagcctaccacaccaccatcgcagacccctaactcctggaaaaccctccttggcggaagcactagggccctcaggtaccgg

SEQ ID NO: 1750 - DNA, 122 bp, Homo sapiens
  misc_feature (61)..(62): /note="This region represents a CpG dinucleotide"
  misc_feature (61)..(61): /note="Nucleotide may be methylated to form 5-methylcytosine"
aaaatcggtgtataacttttgacttcccaaaaacttaattactgatagcctactcttgaccggaagcctcattgataacataaacagttgattaaccatgttttgtatacgtattatatact

SEQ ID NO: 1751 - DNA, 122 bp, Homo sapiens
  misc_feature (61)..(62): /note="This region represents a CpG dinucleotide"
  misc_feature (61)..(61): /note="Nucleotide may be methylated to form 5-methylcytosine"
cagctgctaagtatgtatatgccaattatgcattctggcactggggaaatgaccacaggacgagtccagggacccactggaccgaggtcagacctgagctaaaactctattaattacctgac

SEQ ID NO: 1752 - DNA, 122 bp, Homo sapiens
  misc_feature (61)..(62): /note="This region represents a CpG dinucleotide"
  misc_feature (61)..(61): /note="Nucleotide may be methylated to form 5-methylcytosine"
cccccccttttttttttagaagaaataaaataaaaaacaaaacaaacaaaaaaaataaaacgcagattctgaaacagtagatctgggaaagggcctgagattctgcatttttaacaagcttc

SEQ ID NO: 1753 - DNA, 122 bp, Homo sapiens
  misc_feature (61)..(62): /note="This region represents a CpG dinucleotide"
  misc_feature (61)..(61): /note="Nucleotide may be methylated to form 5-methylcytosine"
aggcttcagtgagccgtgagtggggcactgcactccagtttgggcaacagagtgagacctcgtctccaaaagaacaaaaaatttaacgtatttaaagcactcagaacagcacctgacacatg

SEQ ID NO: 1754 - DNA, 122 bp, Homo sapiens
  misc_feature (61)..(62): /note="This region represents a CpG dinucleotide"
  misc_feature (61)..(61): /note="Nucleotide may be methylated to form 5-methylcytosine"
tgatgggggaaaaattagagtcctgccttggaacaggttaaaggagggcaagagaaggtccgaggcctgcccctgaggcctaccacaccaaacgttataacaacacaacagtttttatatat

SEQ ID NO: 1755 - DNA, 122 bp, Homo sapiens
  misc_feature (61)..(62): /note="This region represents a CpG dinucleotide"
  misc_feature (61)..(61): /note="Nucleotide may be methylated to form 5-methylcytosine"
ttgccagaaatggctccattatcttcagcagagacagcgggcactcgggggccagccctccgtgcctgtgtgcgtcctcttggggaggaaaagctggatgaaaagttaaaccttccaagcac

SEQ ID NO: 1756 - DNA, 122 bp, Homo sapiens
  misc_feature (61)..(62): /note="This region represents a CpG dinucleotide"
  misc_feature (61)..(61): /note="Nucleotide may be methylated to form 5-methylcytosine"
caggcatgagccaccatgctgagcctttaaaatttttttttaacaaatttattgagccaacgttccagaggccacagcctgaaatgaaggtgttggcagagctgtgctccctctgaaaacca

SEQ ID NO: 1757 - DNA, 122 bp, Homo sapiens
  misc_feature (61)..(62): /note="This region represents a CpG dinucleotide"
  misc_feature (61)..(61): /note="Nucleotide may be methylated to form 5-methylcytosine"
gtgttctctgcggcgggccgcgtccccgctgagcctcgcggtgacagccgcctttggcagcgagcgctcggggcacttctatccccgcctctcaaagggtggggacagccgtttccagattt

SEQ ID NO: 1758 - DNA, 122 bp, Homo sapiens
  misc_feature (61)..(62): /note="This region represents a CpG dinucleotide"
  misc_feature (61)..(61): /note="Nucleotide may be methylated to form 5-methylcytosine"
cagacatccttgccttattccttggcaggaaggcatctagtttttcactgttaagtataacgttatccttaggttttttggtagacgttctttatcaagttgaggaagttcccccttttttc

SEQ ID NO: 1759 - DNA, 122 bp, Homo sapiens
  misc_feature (61)..(62): /note="This region represents a CpG dinucleotide"
  misc_feature (61)..(61): /note="Nucleotide may be methylated to form 5-methylcytosine"
cagctggagtgcagtggcacaatcatagctcacttcagacttgaactcctggtctcaagccgtcttcccatcttggcctcccaaagtgcggggattataggcatgagccacctcccctggcc

SEQ ID NO: 1760 - DNA, 122 bp, Homo sapiens
  misc_feature (61)..(62): /note="This region represents a CpG dinucleotide"
  misc_feature (61)..(61): /note="Nucleotide may be methylated to form 5-methylcytosine"
aaagtaatacagttgacccttaagcaacatgggtttgaatgagacagatccacttatacacggattttttcaacaaaagttgcactgagtgtgcctgcatctcccactcccctttcacttcc

SEQ ID NO: 1761 - DNA, 122 bp, Homo sapiens
  misc_feature (61)..(62): /note="This region represents a CpG dinucleotide"
  misc_feature (61)..(61): /note="Nucleotide may be methylated to form 5-methylcytosine"
ccccagctctgtgtgactcagggcagtcacatcatcctgctgggcttctgttcttcagaccgtaaaagaagaagtggttctctacctaagaagtccactggtttttaaatattggaaactga

SEQ ID NO: 1762 - DNA, 122 bp, Homo sapiens
  misc_feature (61)..(62): /note="This region represents a CpG dinucleotide"
  misc_feature (61)..(61): /note="Nucleotide may be methylated to form 5-methylcytosine"
gtaatttacaaggaaaagaaatttatttattatagctcttgaggctaggaagtccaaggccgagcggctcacatctggtgagggcctttgtgctgcatcatccgatgatggaaggtggaaag

SEQ ID NO: 1763 - DNA, 122 bp, Homo sapiens
  misc_feature (61)..(62): /note="This region represents a CpG dinucleotide"
  misc_feature (61)..(61): /note="Nucleotide may be methylated to form 5-methylcytosine"
agcttgcactctgagcttggaaaagccacaggcactcaacttcaaccatgagggaagccacgcaccctgcaaagccacaggagtggagctgcccacggcctcgagggcccaccccttgcacc

SEQ ID NO: 1764 - DNA, 122 bp, Homo sapiens
  misc_feature (61)..(62): /note="This region represents a CpG dinucleotide"
  misc_feature (61)..(61): /note="Nucleotide may be methylated to form 5-methylcytosine"
atagaacttctttgtttaatataaacacagacagaaactcaaataaatgtgtctaatttacgttcatgtttctatcatttcattgccggcagtgatagccagaaactgaggaccctgaaatc

SEQ ID NO: 1765 - DNA, 122 bp, Homo sapiens
  misc_feature (61)..(62): /note="This region represents a CpG dinucleotide"
  misc_feature (61)..(61): /note="Nucleotide may be methylated to form 5-methylcytosine"
agagaggggtcccagaacgaaggtggcggcacgagctctgcgctggcggctgtggggggccggcgctcaggaccccaactccatccaagttgcgccgcggtgggggcgggcggaggcggcgc

SEQ ID NO: 1766 - DNA, 122 bp, Homo sapiens
  misc_feature (61)..(62): /note="This region represents a CpG dinucleotide"
  misc_feature (61)..(61): /note="Nucleotide may be methylated to form 5-methylcytosine"
gagaggccaagaaagagacccagagcctgcaaaagagacatcaagtttattgaagacttacgtatgggatggtccagtggtagtgggctggacaggacagatgctaccacttgtaaaagcat

SEQ ID NO: 1767 - DNA, 122 bp, Homo sapiens
  misc_feature (61)..(62): /note="This region represents a CpG dinucleotide"
  misc_feature (61)..(61): /note="Nucleotide may be methylated to form 5-methylcytosine"
catacctgcctgcaagagctgacgggtatgtctcttcccaaccagcattcagtgagctcacgtaggtagcttgaaatcagccatggtgggagtatttacaccgcagaaataagcagcactat

SEQ ID NO: 1768 - DNA, 122 bp, Homo sapiens
  misc_feature (61)..(62): /note="This region represents a CpG dinucleotide"
  misc_feature (61)..(61): /note="Nucleotide may be methylated to form 5-methylcytosine"
actgactagtaccaaccagacctaataaagctcagcattctttttcatctcttggctccccgcccttttctcacagtggcattgccaaaccttttctactctttcttaagaatttgtgctgg

SEQ ID NO: 1769 - DNA, 122 bp, Homo sapiens
  misc_feature (61)..(62): /note="This region represents a CpG dinucleotide"
  misc_feature (61)..(61): /note="Nucleotide may be methylated to form 5-methylcytosine"
catggacgtactttggtcaagaattaggccgaggcagacatccaggcctgcatgactcagcgggactggtacgcaggtgcacacctccacttgttacataacctgtttgtgtaagctcatac

SEQ ID NO: 1770 - DNA, 122 bp, Homo sapiens
  misc_feature (61)..(62): /note="This region represents a CpG dinucleotide"
  misc_feature (61)..(61): /note="Nucleotide may be methylated to form 5-methylcytosine"
tagggggatgggattatgctgattaagagtaggtccaaccctttatgaactctggctttacgatgaatgaggctggcattaatgcctgcaaaaatggacaaacttgctgtttgaatttattt

SEQ ID NO: 1771 - DNA, 122 bp, Homo sapiens
  misc_feature (61)..(62): /note="This region represents a CpG dinucleotide"
  misc_feature (61)..(61): /note="Nucleotide may be methylated to form 5-methylcytosine"
ttactactgtcttgaactcctgggctcaagagatctccctgcctcagccttctcagtagccgggactacaggtgtgcactaccatgcctggctaatttttacttttggtagagatgggggtc

SEQ ID NO: 1772 - DNA, 122 bp, Homo sapiens
  misc_feature (61)..(62): /note="This region represents a CpG dinucleotide"
  misc_feature (61)..(61): /note="Nucleotide may be methylated to form 5-methylcytosine"
agcaataactgaaatccctaaaaactcaaacacaaacaaaagctgattaattcgaatactcgttttccaaacagtgatgggcacttagatgttttttgaggtttaagtactttgctataata

SEQ ID NO: 1773 - DNA, 122 bp, Homo sapiens
  misc_feature (61)..(62): /note="This region represents a CpG dinucleotide"
  misc_feature (61)..(61): /note="Nucleotide may be methylated to form 5-methylcytosine"
acgtgtatgtataaatccttcatagtcataggacttatgctcctgaaaaaaccataggcccgtcaccttagcttttggatatgagtcccagtttttctgctttactaatgacatgactctga

SEQ ID NO: 1774 - DNA, 122 bp, Homo sapiens
  misc_feature (61)..(62): /note="This region represents a CpG dinucleotide"
  misc_feature (61)..(61): /note="Nucleotide may be methylated to form 5-methylcytosine"
tcccacactatcccttgataaaaactcagtatgtttcactgagagctccttcagccacctcgctcaaggctgggacttctgcccgccattgggtgttgcatttacccacctactttaaatac

SEQ ID NO: 1775 - DNA, 122 bp, Homo sapiens
  misc_feature (61)..(62): /note="This region represents a CpG dinucleotide"
  misc_feature (61)..(61): /note="Nucleotide may be methylated to form 5-methylcytosine"
tcactgaatcatgggggtggtttcagccatgcggttctcgtgatagtgagtgagttctcacgagatctgatggttttaaaagcattgtctggcattttctctgctggcgcttcttctcttgc

SEQ ID NO: 1776 - DNA, 122 bp, Homo sapiens
  misc_feature (61)..(62): /note="This region represents a CpG dinucleotide"
  misc_feature (61)..(61): /note="Nucleotide may be methylated to form 5-methylcytosine"
ttgaaacaggcatcatacttcccctaatctccaaaagttattattatatcctcttctcaacgtaaaaaaaatttttttgcagatttcattcctatgtacaaattcacagcacaatataatga

SEQ ID NO: 1777 - DNA, 122 bp, Homo sapiens
  misc_feature (61)..(62): /note="This region represents a CpG dinucleotide"
  misc_feature (61)..(61): /note="Nucleotide may be methylated to form 5-methylcytosine"
gcgccccctgcaggcggcgcgccacaccgctggccctccggcaccgccccctcccggccccgctccgcccgccgccccccggtactgcccaccttcagcccaccccgcagcccccgcgctct

SEQ ID NO: 1778 - DNA, 122 bp, Homo sapiens
  misc_feature (61)..(62): /note="This region represents a CpG dinucleotide"
  misc_feature (61)..(61): /note="Nucleotide may be methylated to form 5-methylcytosine"
acctctcaggttcaatcaatcctcccacttcagcctcccgagtctgggactacaggtactcgccaccacactcggctatttttttttttttttttagagacagggtctcactatattgccca

SEQ ID NO: 1779 - DNA, 122 bp, Homo sapiens
  misc_feature (61)..(62): /note="This region represents a CpG dinucleotide"
  misc_feature (61)..(61): /note="Nucleotide may be methylated to form 5-methylcytosine"
tcggtcttctcccgcccctccctcccttccccgcctctcccccaagctcctcagtggccgcggcccgtcaacactgtcgcgcagtcactggcgcaggttcccagctctcagctgggggtttc

SEQ ID NO: 1780 - DNA, 122 bp, Homo sapiens
  misc_feature (61)..(62): /note="This region represents a CpG dinucleotide"
  misc_feature (61)..(61): /note="Nucleotide may be methylated to form 5-methylcytosine"
gttttacatctaaagtcccagttaagcagctcttcatttggtcctgcaaacagagtgtctcgtcgaatagtatataggaggttcctttacattaggaactttctcataaaaacagattattt

SEQ ID NO: 1781 - DNA, 122 bp, Homo sapiens
  misc_feature (61)..(62): /note="This region represents a CpG dinucleotide"
  misc_feature (61)..(61): /note="Nucleotide may be methylated to form 5-methylcytosine"
ttgaccaaaacccaccaaaaccaagatggcaatgaaagggacctttggtctttctcactgcgcatatgctaattataatgcattagcatgttaaaagacacccccaccagtgccatcacagt

SEQ ID NO: 1782 - DNA, 122 bp, Homo sapiens
  misc_feature (61)..(62): /note="This region represents a CpG dinucleotide"
  misc_feature (61)..(61): /note="Nucleotide may be methylated to form 5-methylcytosine"
ctgccttcccgggcgcatatgcgagcgcagcacccggcgctgccgagccacctcccccgccgcccgctagcaagtttggcggctccaagccaggcgcgcctcaggatccaggctcatttgct

SEQ ID NO: 1783 - DNA, 122 bp, Homo sapiens
  misc_feature (61)..(62): /note="This region represents a CpG dinucleotide"
  misc_feature (61)..(61): /note="Nucleotide may be methylated to form 5-methylcytosine"
tacccagctttgaggaaatccaaaatagagtactaggccctattggccaaaactggtgtccgatattattgccactacaatggcaagaatattgaattaggcacagcatgcagaaaatacta

SEQ ID NO: 1784 - DNA, 122 bp, Homo sapiens
  misc_feature (61)..(62): /note="This region represents a CpG dinucleotide"
  misc_feature (61)..(61): /note="Nucleotide may be methylated to form 5-methylcytosine"
aaaaaatacaaggtccactcattacaattttaaaaaaaatgaaactcttctggtttatttcgctatcagtgaggatgggcatcttttgaagtattttacttaatgtctttgttttttaaatg

SEQ ID NO: 1785 - DNA, 122 bp, Homo sapiens
  misc_feature (61)..(62): /note="This region represents a CpG dinucleotide"
  misc_feature (61)..(61): /note="Nucleotide may be methylated to form 5-methylcytosine"
tgccttccctgcaccacgcaccccagcacttgtcgctctgctctttcctgttttccgtaacgtgatctaacattacttccaggcaacctacttattgcgcttattgcttacagtctgcctct

SEQ ID NO: 1786 - DNA, 122 bp, Homo sapiens
  misc_feature (61)..(62): /note="This region represents a CpG dinucleotide"
  misc_feature (61)..(61): /note="Nucleotide may be methylated to form 5-methylcytosine"
aatttaccttaaattaactagcattcacgtattcacctatttaaaatattttttattaagcgcctaatattatgtgtgccaggcattgttttagaggttatagtggagtttcagagaggatc

SEQ ID NO: 1787 - DNA, 122 bp, Homo sapiens
  misc_feature (61)..(62): /note="This region represents a CpG dinucleotide"
  misc_feature (61)..(61): /note="Nucleotide may be methylated to form 5-methylcytosine"
cagcctgcgaggccagggccgagcgcgcggagccgaatgctgggctcggggatccgcggccgccgcctctaatccgcccttaagtagtctccgcctgcgtcacgccaggtcggcggagggga

SEQ ID NO: 1788 - DNA, 122 bp, Homo sapiens
  misc_feature (61)..(62): /note="This region represents a CpG dinucleotide"
  misc_feature (61)..(61): /note="Nucleotide may be methylated to form 5-methylcytosine"
aaaggtatgacaggaactgtcttcatgtccttacccaagcaagtcatccatggataaaaacgttaccaggagctggaatacaaatgaggacttccattaaaatgctaaacatcattaaactc

SEQ ID NO: 1789 - DNA, 122 bp, Homo sapiens
  misc_feature (61)..(62): /note="This region represents a CpG dinucleotide"
  misc_feature (61)..(61): /note="Nucleotide may be methylated to form 5-methylcytosine"
tggcccggcccaagcttggctgcgtgttccgctgcgtggaggacgccttcgagagcaagacgctgccgctggacgctctgggcggcggccgcccgggccctcgggttgggaggcgagtctgc

SEQ ID NO: 1790 - DNA, 122 bp, Homo sapiens
  misc_feature (61)..(62): /note="This region represents a CpG dinucleotide"
  misc_feature (61)..(61): /note="Nucleotide may be methylated to form 5-methylcytosine"
agctgccttattagaactttagattcggatctattttcttaacacacatacacatacacgcgcatacatacatatacagagagatacgtggagaaaggaaatttactctatcattgcaatac

SEQ ID NO: 1791 - DNA, 122 bp, Homo sapiens
  misc_feature (61)..(62): /note="This region represents a CpG dinucleotide"
  misc_feature (61)..(61): /note="Nucleotide may be methylated to form 5-methylcytosine"
atcatagcttactgctgtcttgaactcctgggtttaagcaattatcccactttaacctcccgagtagctaggactacaggtacacacaaccatgttcaggtaatttaagaaaaaaacttttt

SEQ ID NO: 1792 - DNA, 122 bp, Homo sapiens
  misc_feature (61)..(62): /note="This region represents a CpG dinucleotide"
  misc_feature (61)..(61): /note="Nucleotide may be methylated to form 5-methylcytosine"
aataatctcagttattgtccaattcttgcaaactgtaacagttggaaagtttgaataattcgttcatgttagcagttgacatataaagacttttatttggcaggcaacagaatatagggttg

SEQ ID NO: 1793 - DNA, 122 bp, Homo sapiens
  misc_feature (61)..(62): /note="This region represents a CpG dinucleotide"
  misc_feature (61)..(61): /note="Nucleotide may be methylated to form 5-methylcytosine"
ctccgtctgaggctactatcttgctctggaggagggagtgagaactggatcactggttagcgtggtaactgttttggacaattgcatagccacagccaggaacacagaaggcagagaggcag

SEQ ID NO: 1794 - DNA, 122 bp, Homo sapiens
  misc_feature (61)..(62): /note="This region represents a CpG dinucleotide"
  misc_feature (61)..(61): /note="Nucleotide may be methylated to form 5-methylcytosine"
attccagcctgggcaacacagcaagaccctatctcaaaaccaatcaaccaaacaaacaaacgaaccaaacaaagatgtagctgtccacacgggaagctatatgaagtgagcttttgttttac

SEQ ID NO: 1795 - DNA, 122 bp, Homo sapiens
  misc_feature (61)..(62): /note="This region represents a CpG dinucleotide"
  misc_feature (61)..(61): /note="Nucleotide may be methylated to form 5-methylcytosine"
aatgttaagcatgctttccagcatgtgctttttctctggcctgagaagctacaggtgcaccgagattgattgactcatttaccttcttaaagcttttttgggaagcagttagacttggttta

SEQ ID NO: 1796 - DNA, 122 bp, Homo sapiens
  misc_feature (61)..(62): /note="This region represents a CpG dinucleotide"
  misc_feature (61)..(61): /note="Nucleotide may be methylated to form 5-methylcytosine"
tatggggtgggaggtaaatcaaggccacaacctcccacctggggaaggatgagcgcgcagcgtgccctgagaaaacacaccctccctgcaaggttgctctaaaagatcacttcctggcccta

SEQ ID NO: 1797 - DNA, 122 bp, Homo sapiens
  misc_feature (61)..(62): /note="This region represents a CpG dinucleotide"
  misc_feature (61)..(61): /note="Nucleotide may be methylated to form 5-methylcytosine"
caggtcacaaagaactgaggaactcaaggactcacactcaccaggttctccaaagcagatcggtgctagagtaccaggagtttaagagttgtgcagcagggaacctctttataggacgttct

SEQ ID NO: 1798 - DNA, 122 bp, Homo sapiens
  misc_feature (61)..(62): /note="This region represents a CpG dinucleotide"
  misc_feature (61)..(61): /note="Nucleotide may be methylated to form 5-methylcytosine"
cttatacctggtccagattcttgcccataactgagacctgaagtgtgtttggtccgaactcgtaaagtctgggccctctgttgacgggccatatcgcatgtctgatttggatgccatatctg

SEQ ID NO: 1799 - DNA, 122 bp, Homo sapiens
  misc_feature (61)..(62): /note="This region represents a CpG dinucleotide"
  misc_feature (61)..(61): /note="Nucleotide may be methylated to form 5-methylcytosine"
ggggtgctttgaagataatctctacctgtctaccctgaatgcaactaaagcattttacagcggtttgccattagggtattcatgcagataatgctttctactaggaattacaaactttaaac

SEQ ID NO: 1800 - DNA, 122 bp, Homo sapiens
  misc_feature (61)..(62): /note="This region represents a CpG dinucleotide"
  misc_feature (61)..(61): /note="Nucleotide may be methylated to form 5-methylcytosine"
caaactctaggactctgaggtgtccttgcagggattaaaactctgactaggtgtcttagtcggcttgggctgccatcacaaaataccatagtcagaatggcttcaacaacagacatttattt

SEQ ID NO: 1801 - DNA, 122 bp, Homo sapiens
  misc_feature (61)..(62): /note="This region represents a CpG dinucleotide"
  misc_feature (61)..(61): /note="Nucleotide may be methylated to form 5-methylcytosine"
tacaagaaatacaagctgggtttgactgaatgacaaaaagaaatctgttgagccaggaagcgtagtaaataccgtgactctctgcaaatgcgcacagcccaaacagctttttccagtctgga

SEQ ID NO: 1802 - DNA, 122 bp, Homo sapiens
  misc_feature (61)..(62): /note="This region represents a CpG dinucleotide"
  misc_feature (61)..(61): /note="Nucleotide may be methylated to form 5-methylcytosine"
tgcttaatatcaacatggtttataagtggacagaaaaacactcactcacgtattcagccacgtatggtctggagtgctctgtagaacagcccgaagtgtacaccatgtctctgcacttgaag

SEQ ID NO: 1803 - DNA, 122 bp, Homo sapiens
  misc_feature (61)..(62): /note="This region represents a CpG dinucleotide"
  misc_feature (61)..(61): /note="Nucleotide may be methylated to form 5-methylcytosine"
aaagatgaaaccagcactttcctcccggcctatggtggaactaagtgatacttagtgttccgcttatggaggaaatggtgacacttcctgatgtaggtttggcactcggaaagcgctgggca

SEQ ID NO: 1804 - DNA, 122 bp, Homo sapiens
  misc_feature (61)..(62): /note="This region represents a CpG dinucleotide"
  misc_feature (61)..(61): /note="Nucleotide may be methylated to form 5-methylcytosine"
catgccccacccctcactgtgatgggataggctggggcccttcatgatggacggaacatacgtttccggaccccaaaatcactcagcaaaggtaagtcaagctggaaactgcgtcaggcaaa

SEQ ID NO: 1805 - DNA, 122 bp, Homo sapiens
  misc_feature (61)..(62): /note="This region represents a CpG dinucleotide"
  misc_feature (61)..(61): /note="Nucleotide may be methylated to form 5-methylcytosine"
gtctggagtttagttaaaagtaacgtgtcattggtggtttattagctttaacagacgttccgtgctgttgtaaaatgttcactgtcagggaaaaaggatgaagggcacacagacactgtatt

SEQ ID NO: 1806 - DNA, 122 bp, Homo sapiens
  misc_feature (61)..(62): /note="This region represents a CpG dinucleotide"
  misc_feature (61)..(61): /note="Nucleotide may be methylated to form 5-methylcytosine"
agagaggctgttattgtttgtcattagcaccctggaacctttttcatcttcaaagctcctcgcaaaagggttcattaaccgtcgccctctttcctgtgagagagtaaacaagtatgattagt

SEQ ID NO: 1807 - DNA, 122 bp, Homo sapiens
  misc_feature (61)..(62): /note="This region represents a CpG dinucleotide"
  misc_feature (61)..(61): /note="Nucleotide may be methylated to form 5-methylcytosine"
ttgccacagctaatgagtggcagcactagcatttgagtccaggtctatctgattcccagtcgcagccacttagccccagactgtgccgctttccgcatagctgtcctgccatggatattatc

SEQ ID NO: 1808 - DNA, 122 bp, Homo sapiens
  misc_feature (61)..(62): /note="This region represents a CpG dinucleotide"
  misc_feature (61)..(61): /note="Nucleotide may be methylated to form 5-methylcytosine"
ggtgatccgccctcctcggcctcccaaagtgctgggattacaggtgtgagccacggtgcacggcccctggagaggttttaatggcccagcctcacacccaggtctggcctcccaggccacca

SEQ ID NO: 1809 - DNA, 122 bp, Homo sapiens
  misc_feature (61)..(62): /note="This region represents a CpG dinucleotide"
  misc_feature (61)..(61): /note="Nucleotide may be methylated to form 5-methylcytosine"
ccacctcctagacttaagccatcctcccacctcagtctcttgtgtagctgggaccataggcgcatgccaccatgctggctaattttaaaattttttgtagaaacggggtcccactgtgttgc

SEQ ID NO: 1810 - DNA, 122 bp, Homo sapiens
  misc_feature (61)..(62): /note="This region represents a CpG dinucleotide"
  misc_feature (61)..(61): /note="Nucleotide may be methylated to form 5-methylcytosine"
gtgcttatcttcctttaggccaattaattagagctatttctatagacgtcacacacaacacgtatataactccacggacaggcagaagaaaacccagcccccacaagatccttcatttgcca

SEQ ID NO: 1811 - DNA, 122 bp, Homo sapiens
  misc_feature (61)..(62): /note="This region represents a CpG dinucleotide"
  misc_feature (61)..(61): /note="Nucleotide may be methylated to form 5-methylcytosine"
ccctgtgcgtgccgccgcgctgttgctcgcagtgtgctggcgccgagctcggtggacacgcgcgcagtcagagctgcctctcgccctcgctagctgggctcgcagcctcttcctccctccct

SEQ ID NO: 1812 - DNA, 122 bp, Homo sapiens
  misc_feature (61)..(62): /note="This region represents a CpG dinucleotide"
  misc_feature (61)..(61): /note="Nucleotide may be methylated to form 5-methylcytosine"
cggtggggggcgggctgggggcggggcggccggggctgccttcccgggcgcatatgcgagcgcagcacccggcgctgccgagccacctcccccgccgcccgctagcaagtttggcggctcca

SEQ ID NO: 1813 - DNA, 122 bp, Homo sapiens
  misc_feature (61)..(62): /note="This region represents a CpG dinucleotide"
  misc_feature (61)..(61): /note="Nucleotide may be methylated to form 5-methylcytosine"
tgttcaccaagtgtttatgaatcatccaagaaggtcaggataggtttttgttttgctttacgggagacatcctgaatctgaaaggcagaagacacctatctggcaggtccagggttagcaca

SEQ ID NO: 1814 - DNA, 122 bp, Homo sapiens
  misc_feature (61)..(62): /note="This region represents a CpG dinucleotide"
  misc_feature (61)..(61): /note="Nucleotide may be methylated to form 5-methylcytosine"
tcaaggaacgtttttatgactcaccaattcttttcagattacctctttgatttttattgtcggtggcttatgaaaacctaggatgatagaaggaatagtctaaataatccagacaatagata

SEQ ID NO: 1815 - DNA, 122 bp, Homo sapiens
  misc_feature (61)..(62): /note="This region represents a CpG dinucleotide"
  misc_feature (61)..(61): /note="Nucleotide may be methylated to form 5-methylcytosine"
catctgccggaaaatttttgaaataaatatacaaatctgccatgtccataaaataagtggcgcctcctagggttgtgttgtgcaaaacatgcatgattgtaaaatgtgtaaaacatgcatgt

SEQ ID NO: 1816 - DNA, 122 bp, Homo sapiens
  misc_feature (61)..(62): /note="This region represents a CpG dinucleotide"
  misc_feature (61)..(61): /note="Nucleotide may be methylated to form 5-methylcytosine"
cttccagttcccttaatctgtctccctgcacaagctcaaagttgccgaagaataggtctgcgtttgtttcatatttcacacacttcttcaagcagtattccaactcaaaaagatagtctgag

SEQ ID NO: 1817 - DNA, 122 bp, Homo sapiens
  misc_feature (61)..(62): /note="This region represents a CpG dinucleotide"
  misc_feature (61)..(61): /note="Nucleotide may be methylated to form 5-methylcytosine"
gatatggggtgattgtggtgtcactcctggagttagagcccacagaagcagcagcaggaacggagccatgagaatggagagtttagctttggacatcccgagtttgaggagtctgcagacca

SEQ ID NO: 1818 - DNA, 122 bp, Homo sapiens
  misc_feature (61)..(62): /note="This region represents a CpG dinucleotide"
  misc_feature (61)..(61): /note="Nucleotide may be methylated to form 5-methylcytosine"
gaaactctgatcccaaatgatggtattgcggggtgcggccttagggaggtgattaggtcacgaaggcagagccttcatgggtgggattaatgcccttataagaacagtaagagataaatgtt

SEQ ID NO: 1819 - DNA, 122 bp, Homo sapiens
  misc_feature (61)..(62): /note="This region represents a CpG dinucleotide"
  misc_feature (61)..(61): /note="Nucleotide may be methylated to form 5-methylcytosine"
tcattgtggcaatgttgctggtgacaacaaaaatgatccaccaacggaaacaactggcttcgctgctcaggtgattatcctgaagcatccagtccaaatcagtgctggctattcccctctac

SEQ ID NO: 1820 - DNA, 122 bp, Homo sapiens
  misc_feature (61)..(62): /note="This region represents a CpG dinucleotide"
  misc_feature (61)..(61): /note="Nucleotide may be methylated to form 5-methylcytosine"
gagcttagcattgttctctgttgctgggaagttgaatattcagaggcagccattgctagacggccttggtaagtgggagttcatgctgttaagcccatgcatagcctccatgtagccaatca

SEQ ID NO: 1821 - DNA, 122 bp, Homo sapiens
  misc_feature (61)..(62): /note="This region represents a CpG dinucleotide"
  misc_feature (61)..(61): /note="Nucleotide may be methylated to form 5-methylcytosine"
ttttaaagatgaaaactaagcccacgaagcttgagtcatctggagatgaagcagtcgcagcggagcagtcttggtaatggagaagatcatgtcagcgctgagaaaggcagggagggaggcct

SEQ ID NO: 1822 - DNA, 122 bp, Homo sapiens
  misc_feature (61)..(62): /note="This region represents a CpG dinucleotide"
  misc_feature (61)..(61): /note="Nucleotide may be methylated to form 5-methylcytosine"
gtgctcatgagaagtgagtcttgcaaggaaatgacatttccttcccagggtagggaagcacgcactgctgagattctacgggtatgacggcagcaccagccactgcaggacaaagatgacta

SEQ ID NO: 1823 - DNA, 122 bp, Homo sapiens
  misc_feature (61)..(62): /note="This region represents a CpG dinucleotide"
  misc_feature (61)..(61): /note="Nucleotide may be methylated to form 5-methylcytosine"
caaactcctgacctcaaatgatccacccacctcagcctctgaaagtgctgagattacaggcgtgagccactgcgccctgctgtatgccagttaactttgattgaaatgtaaactagtccctc

SEQ ID NO: 1824 - DNA, 122 bp, Homo sapiens
  misc_feature (61)..(62): /note="This region represents a CpG dinucleotide"
  misc_feature (61)..(61): /note="Nucleotide may be methylated to form 5-methylcytosine"
cccgtccttcaaagagctcaaagggcttagacagcaggcacctgcagctgtggtgctggtcgcccctcccccagggaactcaacgggcttaagcagattctagttgagaggcttttgagaat

SEQ ID NO: 1825 - DNA, 122 bp, Homo sapiens
  misc_feature (61)..(62): /note="This region represents a CpG dinucleotide"
  misc_feature (61)..(61): /note="Nucleotide may be methylated to form 5-methylcytosine"
gctcgcgggggggctcgcggggggctggcggggggctggcggggggctcgcgggggggctcgcgggggggctcgcgggggggctcgcggggggctcgcgggggggctcgcggggggctcgcg

SEQ ID NO: 1826 - DNA, 122 bp, Homo sapiens
  misc_feature (61)..(62): /note="This region represents a CpG dinucleotide"
  misc_feature (61)..(61): /note="Nucleotide may be methylated to form 5-methylcytosine"
aatgcctctgtctagtcagttgaagcaatttgcatgcagactgaagccaaaccttccttccgtcccccgggtccctgcagccgggaggaagggcgtgagaggacaaactaacatttattgag

SEQ ID NO: 1827 - DNA, 122 bp, Homo sapiens
  misc_feature (61)..(62): /note="This region represents a CpG dinucleotide"
  misc_feature (61)..(61): /note="Nucleotide may be methylated to form 5-methylcytosine"
acctcaggtgatctgcctgcctcggcctcccaaagtgctgggatttcagccatgagccaccgtgcctgtcctggaggatgaatttttgaaaatatttggaagtcattcagatttccttgagg

SEQ ID NO: 1828 - DNA, 122 bp, Homo sapiens
  misc_feature (61)..(62): /note="This region represents a CpG dinucleotide"
  misc_feature (61)..(61): /note="Nucleotide may be methylated to form 5-methylcytosine"
gaactcctggcctcaagtgattctcctcccttggcatccacaaattactaggattacaggcgtgaaccaccatgcctggccttgaactgtatctttaaagcccctgaaatattgttcctacc

SEQ ID NO: 1829 - DNA, 122 bp, Homo sapiens
  misc_feature (61)..(62): /note="This region represents a CpG dinucleotide"
  misc_feature (61)..(61): /note="Nucleotide may be methylated to form 5-methylcytosine"
ttttcagtagagacggggtttcaacatgttggtcaggctggtatcgaactccacccacctcgccctcccaaagtgctgggattacaggcatgagccactgtgcctggccagagcccaggagt

SEQ ID NO: 1830 - DNA, 122 bp, Homo sapiens
  misc_feature (61)..(62): /note="This region represents a CpG dinucleotide"
  misc_feature (61)..(61): /note="Nucleotide may be methylated to form 5-methylcytosine"
cagcattttgggaggcccctggagtagttgggactacagctaggtgccaccatgcccagccgatttttgtattttgagtagagatggggtttcaccatgttggctaggttggtctcaaactc

SEQ ID NO: 1831 - DNA, 122 bp, Homo sapiens
  misc_feature (61)..(62): /note="This region represents a CpG dinucleotide"
  misc_feature (61)..(61): /note="Nucleotide may be methylated to form 5-methylcytosine"
agattggaaggggagaagctgactgctgtccctctctttgctgaccagaggcttctagtacgcagcaggcaggagacgagtgaggagaagcttttagatttaaatcatgatggcagtgttaa

SEQ ID NO: 1832 - DNA, 122 bp, Homo sapiens
  misc_feature (61)..(62): /note="This region represents a CpG dinucleotide"
  misc_feature (61)..(61): /note="Nucleotide may be methylated to form 5-methylcytosine"
cctctagactcctccctaacctggaaaggtgcaacgctactgggctccactttctaagcacgaggtccacccaggagtttcttaggagtgctattgttgctttggttacttcctaaaataac

SEQ ID NO: 1833 - DNA, 122 bp, Homo sapiens
  misc_feature (61)..(62): /note="This region represents a CpG dinucleotide"
  misc_feature (61)..(61): /note="Nucleotide may be methylated to form 5-methylcytosine"
tttcactcctgttggctgccggcatgggacccagcaaaagcaacaacagcagccgagtcacgcaagtgcaaacttgctgctttttaagcaacaagctggcagggaagagatcctctctttat

SEQ ID NO: 1834 - DNA, 122 bp, Homo sapiens
  misc_feature (61)..(62): /note="This region represents a CpG dinucleotide"
  misc_feature (61)..(61): /note="Nucleotide may be methylated to form 5-methylcytosine"
gggaagtgttggagccgggattcaattcaagctgttggcttcagattcccagttcatactcgctccctctatgaaacctccacccatccatttggaaaatgttgctagctagcttcaccttc

SEQ ID NO: 1835 - DNA, 122 bp, Homo sapiens
  misc_feature (61)..(62): /note="This region represents a CpG dinucleotide"
  misc_feature (61)..(61): /note="Nucleotide may be methylated to form 5-methylcytosine"
tctggacctctcgtttagaccttctctcctgactgccagatggcatgtcccactgtcctccggtgtacatctccaaattgtcccacaggcatttatctcagatgaagtttcaggttggactc

SEQ ID NO: 1836 - DNA, 122 bp, Homo sapiens
  misc_feature (61)..(62): /note="This region represents a CpG dinucleotide"
  misc_feature (61)..(61): /note="Nucleotide may be methylated to form 5-methylcytosine"
tgtgtcaccatgtgcctggctttttctcagccacatgcatttgaggtctgcctgggttgtcgtgtgactcgagagtccattcctctttgtcgctgagaatatttcgttgtgtggatctacca

SEQ ID NO: 1837 - DNA, 122 bp, Homo sapiens
  misc_feature (61)..(62): /note="This region represents a CpG dinucleotide"
  misc_feature (61)..(61): /note="Nucleotide may be methylated to form 5-methylcytosine"
ttaacaaaatttcctgcagaaaaaaggtaaattaagccctgtctaaaacgtataaatctacgtaggccaattagactacagctgttaaggaagaagtgggggccttttattaaatacttaaa

SEQ ID NO: 1838 - DNA, 122 bp, Homo sapiens
  misc_feature (61)..(62): /note="This region represents a CpG dinucleotide"
  misc_feature (61)..(61): /note="Nucleotide may be methylated to form 5-methylcytosine"
cactgcctaatcctccctgccctgagatcctggcaaccactaatctactttgtgtctctgcggatttgtcagttctagatatttcatataagtggaatcacagggtatgtaaccttttgtgt

SEQ ID NO: 1839 - DNA, 122 bp, Homo sapiens
  misc_feature (61)..(62): /note="This region represents a CpG dinucleotide"
  misc_feature (61)..(61): /note="Nucleotide may be methylated to form 5-methylcytosine"
taggccctggcaaccactgatctgttttctctccctatagttttgcttttttcagaatgtcgtatgttacatatattagtccatcatataattcttccctctttgagaaaagaaagaattaa

SEQ ID NO: 1840 - DNA, 122 bp, Homo sapiens
  misc_feature (61)..(62): /note="This region represents a CpG dinucleotide"
  misc_feature (61)..(61): /note="Nucleotide may be methylated to form 5-methylcytosine"
tcaaaaaaacaaacaaacaataacaaaataaataaataaaagacttgaactcagaccagacgtgatgaccagctgaatttaagcatattagtcagcagaggaaaagaaactaaccaggattc

SEQ ID NO: 1841 - DNA, 122 bp, Homo sapiens
  misc_feature (61)..(62): /note="This region represents a CpG dinucleotide"
  misc_feature (61)..(61): /note="Nucleotide may be methylated to form 5-methylcytosine"
ctttgtcactgaccagggtgcctgcgctggcagtcccagcctcgtggccgccgcgcgccgcgccttcccctgcaaggatgcggccctctgcgcctacgcggtcacctacacagcggtgagct

SEQ ID NO: 1842 - DNA, 122 bp, Homo sapiens
  misc_feature (61)..(62): /note="This region represents a CpG dinucleotide"
  misc_feature (61)..(61): /note="Nucleotide may be methylated to form 5-methylcytosine"
atcttggggatattagtaaaccattagaagatgtcttggaattgtaaatctagagcaatgcgctagaaaggagataggaaagaatgaaggcaggaaaatcagtgtgctattttagtagtcta

SEQ ID NO: 1843 - DNA, 122 bp, Homo sapiens
  misc_feature (61)..(62): /note="This region represents a CpG dinucleotide"
  misc_feature (61)..(61): /note="Nucleotide may be methylated to form 5-methylcytosine"
ttttgttactggaaaagatagtgaccttaccagggccaaagtttgtagacacaggaattacgaaatggagaagggggagaagtgagctagtggcagcataaaaagaccagcagatgccccac

SEQ ID NO: 1844 - DNA, 122 bp, Homo sapiens
  misc_feature (61)..(62): /note="This region represents a CpG dinucleotide"
  misc_feature (61)..(61): /note="Nucleotide may be methylated to form 5-methylcytosine"
aaccaaccccctgcttaacctgagtttgcaaatgtcaaagttggagataggtcataaaatcgactcactggtagattttacagactgaatcttgctgtgttgcccaggctggtctataaaac

SEQ ID NO: 1845 - DNA, 122 bp, Homo sapiens
  misc_feature (61)..(62): /note="This region represents a CpG dinucleotide"
  misc_feature (61)..(61): /note="Nucleotide may be methylated to form 5-methylcytosine"
ggcgatcctctcatctcagcctccctagtagctgaggccacaggcacgtgccacagtgcccggctaatttttatattttattgtagagatggggatctcactatgttacccagactggtttc

SEQ ID NO: 1846 - DNA, 122 bp, Homo sapiens
  misc_feature (61)..(62): /note="This region represents a CpG dinucleotide"
  misc_feature (61)..(61): /note="Nucleotide may be methylated to form 5-methylcytosine"
gtccaatacagtcatgtgctacaccatgacatttcagtcaatgacaggccgcatataggacggtggtcccataggattataaagaagctgaaaaatttctgttgcctcgtgatgtcgtatct

SEQ ID NO: 1847 - DNA, 122 bp, Homo sapiens
  misc_feature (61)..(62): /note="This region represents a CpG dinucleotide"
  misc_feature (61)..(61): /note="Nucleotide may be methylated to form 5-methylcytosine"
aaaattatgatcaaataaatttgtatgccttttctcctattaacctgccttttttgtcagcgattgtcagtgaaacttcagagggcaaaggggaagttttccttggcccctccagttttggt

SEQ ID NO: 1848 - DNA, 122 bp, Homo sapiens
  misc_feature (61)..(62): /note="This region represents a CpG dinucleotide"
  misc_feature (61)..(61): /note="Nucleotide may be methylated to form 5-methylcytosine"
acataaggccgattcacacttcagctataacagaaaataccctctccatagggcataatccgtaaatgactttgtaactttacctcatcctctccatttacacaaggcataaccgaagtaac

SEQ ID NO: 1849 - DNA, 122 bp, Homo sapiens
  misc_feature (61)..(62): /note="This region represents a CpG dinucleotide"
  misc_feature (61)..(61): /note="Nucleotide may be methylated to form 5-methylcytosine"
tgcgattggcatctgaaatgggggctgtcttgtgagactgagtcctaaacttgggtctgacgttaactccagttagacagtgtcagaatgaaattgaattgtaggatgcccagttggtatct

SEQ ID NO: 1850 - DNA, 122 bp, Homo sapiens
  misc_feature (61)..(62): /note="This region represents a CpG dinucleotide"
  misc_feature (61)..(61): /note="Nucleotide may be methylated to form 5-methylcytosine"
ggaaactgtctccagaagcttccctccccacgacagataatgagcagcaagtgcttctggcgacttagggtgatgtgaaatcacgctgggaatcctgctcctcctcaggtcctggcagtttc

SEQ ID NO: 1851 - DNA, 122 bp, Homo sapiens
  misc_feature (61)..(62): /note="This region represents a CpG dinucleotide"
  misc_feature (61)..(61): /note="Nucleotide may be methylated to form 5-methylcytosine"
ggggtgcggagagcgggcctgtgattcaccagagggttgcagagagaggcccaagaatcgcgggaggggtgcggagaggggcctgtgaatcacgggaggggtgcggagaggggcccgtgaat

SEQ ID NO: 1852 - DNA, 122 bp, Homo sapiens
  misc_feature (61)..(62): /note="This region represents a CpG dinucleotide"
  misc_feature (61)..(61): /note="Nucleotide may be methylated to form 5-methylcytosine"
gggccttcaacaacctctacagggcagagcaggcctggctgcttccccaggccagctgcacggggaccttccatgtgggttaaatgtccacaccccaggcaaagcctaaagcacacactgga

SEQ ID NO: 1853 - DNA, 122 bp, Homo sapiens
  misc_feature (61)..(62): /note="This region represents a CpG dinucleotide"
  misc_feature (61)..(61): /note="Nucleotide may be methylated to form 5-methylcytosine"
gagacgctgggctgggaaccgtccaatcaggaacgcagctggtgcggatagggcggcttccgggatgtggcggggcctttgtctctcgctgcagcctgagctctaggtcttgttttccctgc

SEQ ID NO: 1854 - DNA, 122 bp, Homo sapiens
  misc_feature (61)..(62): /note="This region represents a CpG dinucleotide"
  misc_feature (61)..(61): /note="Nucleotide may be methylated to form 5-methylcytosine"
atattaaatatatataacacatatattatttagcatactgaaacacacacacgtaccacacgtatggtaattccatgccaatttgccacaaaaaatactttcatctagttcttttttagtgc

SEQ ID NO: 1855 - DNA, 122 bp, Homo sapiens
  misc_feature (61)..(62): /note="This region represents a CpG dinucleotide"
  misc_feature (61)..(61): /note="Nucleotide may be methylated to form 5-methylcytosine"
tacctgtattaatttctgtctctttgaaatccttaaaaatgtttttccaatctcctttaacgtggtcagttttaggcttaatgtgcgctgtaactcttaagaaggtagacatattaaagagc

SEQ ID NO: 1856 - DNA, 122 bp, Homo sapiens
  misc_feature (61)..(62): /note="This region represents a CpG dinucleotide"
  misc_feature (61)..(61): /note="Nucleotide may be methylated to form 5-methylcytosine"
ataaaataataaaaaacgccccagagaggccccttgccccttccagcatatatggactctcgagaaggtgccatctatgagtcaggaagtgaccttcaccagacactgaagtggccagggcc

SEQ ID NO: 1857 - DNA, 122 bp, Homo sapiens
  misc_feature (61)..(62): /note="This region represents a CpG dinucleotide"
  misc_feature (61)..(61): /note="Nucleotide may be methylated to form 5-methylcytosine"
ctgccaggtttcagcccacagtgaattcttgcagctgggttaggatcccccaagaaagggcgttcaaaacaaaaatgctgagggaggcatttcagccaagggaggcatttcagctgtggagg

SEQ ID NO: 1858 - DNA, 122 bp, Homo sapiens
  misc_feature (61)..(62): /note="This region represents a CpG dinucleotide"
  misc_feature (61)..(61): /note="Nucleotide may be methylated to form 5-methylcytosine"
cgcgctctcgggtttcgaatcgcagggcaggtcttttgcgtcaggctccagaggcgtgtgcgccaggccaaagccctcgtctgcgtcggccatggtgcgcccagggccctgtgcccgcgcaa

SEQ ID NO: 1859 - DNA, 122 bp, Homo sapiens
  misc_feature (61)..(62): /note="This region represents a CpG dinucleotide"
  misc_feature (61)..(61): /note="Nucleotide may be methylated to form 5-methylcytosine"
ggccgagtgtctcatttgcttaaggcacaaacttctggtagctctaccccatcctcctaacgtgcatgtgtgcccttggcttgagttactccatattgctttgtaacccttactgcacatgt

SEQ ID NO: 1860 - DNA, 122 bp, Homo sapiens
  misc_feature (61)..(62): /note="This region represents a CpG dinucleotide"
  misc_feature (61)..(61): /note="Nucleotide may be methylated to form 5-methylcytosine"
gagagatgggtgaaggattctgtccccagcctgacccccaggtgtgccaggcaggtactccggggaccgccaggatgagagagtgggcctgagcccgggcttttgctgaaaaggaggccgat

SEQ ID NO: 1861 - DNA, 122 bp, Homo sapiens
  misc_feature (61)..(62): /note="This region represents a CpG dinucleotide"
  misc_feature (61)..(61): /note="Nucleotide may be methylated to form 5-methylcytosine"
cagagagattaaggactttaatccccagctctgaataaccatacaggccttcaagacatgcgctttctttacctgtttggattgaagtaggcgatctcttaaggtctcataacttttaaaat

SEQ ID NO: 1862 - DNA, 122 bp, Homo sapiens
  misc_feature (61)..(62): /note="This region represents a CpG dinucleotide"
  misc_feature (61)..(61): /note="Nucleotide may be methylated to form 5-methylcytosine"
ctccatggtcgggagagacaccaggcgaggcgaggcggcgggagagcgcgggagttcggccggcctcggacgccaccactgcgcaggcgcggcagcctgaggggctcgccgggaaatgtggt

SEQ ID NO: 1863 - DNA, 122 bp, Homo sapiens
  misc_feature (61)..(62): /note="This region represents a CpG dinucleotide"
  misc_feature (61)..(61): /note="Nucleotide may be methylated to form 5-methylcytosine"
tgtattccacaccagagcatgtcttgatttgggccagccatgtttcaaatgctcaacagccgcgtgtatggatggtggggtcttggtcagtcacctgtctcactggtcctcccttgcatgaa

SEQ ID NO: 1864 - DNA, 122 bp, Homo sapiens
  misc_feature (61)..(62): /note="This region represents a CpG dinucleotide"
  misc_feature (61)..(61): /note="Nucleotide may be methylated to form 5-methylcytosine"
ggaaaactattagggagactttggatagttctctctcagagcctacagaagaaccaacctcgcagacaaattgatttaatactttagctctcctactgtgaaagaagacatttctgctattt

SEQ ID NO: 1865 - DNA, 122 bp, Homo sapiens
  misc_feature (61)..(62): /note="This region represents a CpG dinucleotide"
  misc_feature (61)..(61): /note="Nucleotide may be methylated to form 5-methylcytosine"
agagctttgatctgtcacagggctctcttgggttaattgctgctgttctcaagtcatcctcgctcagacaggtaggtgggagtgagtagaattagccaattgtacagagaatcaaagccatt

SEQ ID NO: 1866 - DNA, 122 bp, Homo sapiens
  misc_feature (61)..(62): /note="This region represents a CpG dinucleotide"
  misc_feature (61)..(61): /note="Nucleotide may be methylated to form 5-methylcytosine"
gagggatgttgtcatgcttggcattgtcttgttggtgtagtttgtctgcacccctcagctcgtgggttaatggtgattgtgggagctgcctcagtatctctgacagttctaatgatacggga

SEQ ID NO: 1867 - DNA, 122 bp, Homo sapiens
  misc_feature (61)..(62): /note="This region represents a CpG dinucleotide"
  misc_feature (61)..(61): /note="Nucleotide may be methylated to form 5-methylcytosine"
gagttcagtttgcacatgttcagtgcttagcacagggcctggctactgttgttactgctgcggtggttgttaatttcttcacgtgtcgaatgggagcgggagctcctgccctgccagagtcc

SEQ ID NO: 1868 - DNA, 122 bp, Homo sapiens
  misc_feature (61)..(62): /note="This region represents a CpG dinucleotide"
  misc_feature (61)..(61): /note="Nucleotide may be methylated to form 5-methylcytosine"
tgagtgccaaatcactctcctctctattggtgaagctctgaattatcttcctcctgcagacgtgatcttctgtattcattctcacagttggaagcattattattcaacctgttggctcagcc

SEQ ID NO: 1869 - DNA, 122 bp, Homo sapiens
  misc_feature (61)..(62): /note="This region represents a CpG dinucleotide"
  misc_feature (61)..(61): /note="Nucleotide may be methylated to form 5-methylcytosine"
ttccagaccagcctgaccatcatggtgaaaccctgtgtctactaataatacaaaattagccgggtgtggtagcacacgcctgtaatcccagctatttgggaggctgaggcaggataatcgct

SEQ ID NO: 1870 - DNA, 122 bp, Homo sapiens
  misc_feature (61)..(62): /note="This region represents a CpG dinucleotide"
  misc_feature (61)..(61): /note="Nucleotide may be methylated to form 5-methylcytosine"
ggtctcactatgttgcccagtttggtctcaagtggatcctcctgccttggcctcctaaagcgttaggattacaggtgtgagccaccacacctggccctgtttaggatttagatctcctttta

SEQ ID NO: 1871 - DNA, 122 bp, Homo sapiens
  misc_feature (61)..(62): /note="This region represents a CpG dinucleotide"
  misc_feature (61)..(61): /note="Nucleotide may be methylated to form 5-methylcytosine"
tgtggttccaattcagagacagaccaatggaacagctcagagcctcaaaggagatttacacgagaaggaaataaaatgtacaacagaagtcagtaagggaaggaaaatctatttaaaaatga

SEQ ID NO: 1872 - DNA, 122 bp, Homo sapiens
  misc_feature (61)..(62): /note="This region represents a CpG dinucleotide"
  misc_feature (61)..(61): /note="Nucleotide may be methylated to form 5-methylcytosine"
tctacttgctacccacattcaccacagtggtaggtgaccttaaacactacttgtggtgtacgttatcgtgcccaagacagtggagtcaccgggcagcacaagggatatccactcaactcctg

SEQ ID NO: 1873 - DNA, 122 bp, Homo sapiens
  misc_feature (61)..(62): /note="This region represents a CpG dinucleotide"
  misc_feature (61)..(61): /note="Nucleotide may be methylated to form 5-methylcytosine"
cacataatgctaccaggagttcctgccggctgcagactctccgcctcctctcccaagagccgagggtctgcctgcccagattcctttatatacagaagtcaggcttgttttcagctgcacat

SEQ ID NO: 1874 - DNA, 122 bp, Homo sapiens
  misc_feature (61)..(62): /note="This region represents a CpG dinucleotide"
  misc_feature (61)..(61): /note="Nucleotide may be methylated to form 5-methylcytosine"
agcaccccagctcccccacccccaggagcccctcaaccttggcctgctgtcatcctcgtccggccccaatcttcctgcaaatcgggcccttgcaggattcctgctgactcagcagctgggcc

SEQ ID NO: 1875 - DNA, 122 bp, Homo sapiens
  misc_feature (61)..(62): /note="This region represents a CpG dinucleotide"
  misc_feature (61)..(61): /note="Nucleotide may be methylated to form 5-methylcytosine"
tgttagaaacgttagataatatcctgggtataccccgtgccaaatggcagagagaatgaacgtctggatagttggactgaaggaggttcgttcataacacaccctagaaaccatgaaaaaca

SEQ ID NO: 1876 - DNA, 122 bp, Homo sapiens
  misc_feature (61)..(62): /note="This region represents a CpG dinucleotide"
  misc_feature (61)..(61): /note="Nucleotide may be methylated to form 5-methylcytosine"
acatcgcttctgcgccgctgcaacatgcctggatgctctgcgctgtgggcgctggctcatcgcccctctgattcacaccgttattaaaccagcactcgggcaagaagcaaaatcgtccaggg

SEQ ID NO: 1877 - DNA, 122 bp, Homo sapiens
  misc_feature (61)..(62): /note="This region represents a CpG dinucleotide"
  misc_feature (61)..(61): /note="Nucleotide may be methylated to form 5-methylcytosine"
acaatattctccggcgtttctgcttctgatgtcaacatcagagatgtatgaactgaaccgcgccaaagtcagaactcggcttcggccacactaggcatggcccaggtaatcccagctactca

SEQ ID NO: 1878 - DNA, 122 bp, Homo sapiens
  misc_feature (61)..(62): /note="This region represents a CpG dinucleotide"
  misc_feature (61)..(61): /note="Nucleotide may be methylated to form 5-methylcytosine"
gtgaggaaacaaaggcttgataaatttagtaaatgagattatgtcattgagtcacttgcccgaggtcatatagtcagtaaataggcagaactgagacctgagtcacacatacttgtgtcacc

SEQ ID NO: 1879 - DNA, 122 bp, Homo sapiens
  misc_feature (61)..(62): /note="This region represents a CpG dinucleotide"
  misc_feature (61)..(61): /note="Nucleotide may be methylated to form 5-methylcytosine"
tcacacacagtctacctcaattcctattaccatgtctgctttcagcaaaaaattacaaggcgtgctaaaagacaagaaaaaatacaatccaaagagacatagccagcatcagaactagactc

SEQ ID NO: 1880 - DNA, 122 bp, Homo sapiens
  misc_feature (61)..(62): /note="This region represents a CpG dinucleotide"
  misc_feature (61)..(61): /note="Nucleotide may be methylated to form 5-methylcytosine"
gacgaagcgagccccctggtggaagccagcagaaccaggtgcgtggcggcggaggcggggcggcccgctgggaaaccgaggaggggtcggattagttgaggggtggggtggggatgttcttt

SEQ ID NO: 1881 - DNA, 122 bp, Homo sapiens
  misc_feature (61)..(62): /note="This region represents a CpG dinucleotide"
  misc_feature (61)..(61): /note="Nucleotide may be methylated to form 5-methylcytosine"
ggtcagccatctgtggggataagagatggctaaacaaccaagctggtatcctgtcatttgcgggtttttttgttttgtgtgttttttgttgttgttgttgttggagacagagtcttgctctg

SEQ ID NO: 1882 - DNA, 122 bp, Homo sapiens
  misc_feature (61)..(62): /note="This region represents a CpG dinucleotide"
  misc_feature (61)..(61): /note="Nucleotide may be methylated to form 5-methylcytosine"
gactccttgcaacatgcaattccagaattacgagaatctgcttttccgcgctgtcttattcgtcctggctgggggaagattcagcattctgcacatgattcggaattcaaaactccagcgcc

SEQ ID NO: 1883 - DNA, 122 bp, Homo sapiens
  misc_feature (61)..(62): /note="This region represents a CpG dinucleotide"
  misc_feature (61)..(61): /note="Nucleotide may be methylated to form 5-methylcytosine"
ggttgcctgcttacagctttatgagttcttcagtttacatacaccctgcactcactttaacgcttatgaaaccaaagcatttttaaaatccatagcgctaaccccttccattcaatacttac

SEQ ID NO: 1884 - DNA, 122 bp, Homo sapiens
  misc_feature (61)..(62): /note="This region represents a CpG dinucleotide"
  misc_feature (61)..(61): /note="Nucleotide may be methylated to form 5-methylcytosine"
cccataaaagaaagcaccatccgcgcttctactttctgtttcttcttacatcctgctgctcggaagactgaggccacactaagcctgacagacgtatgatgagcaaggaatttacgcagggt

SEQ ID NO: 1885 - DNA, 122 bp, Homo sapiens
  misc_feature (61)..(62): /note="This region represents a CpG dinucleotide"
  misc_feature (61)..(61): /note="Nucleotide may be methylated to form 5-methylcytosine"
aagggggaggtgccacacacttttaaaccaaccagatctcgtgagaattcatcatcacggcgacagcaccaggggacgatggtgttaaaccatgagaaaccaccaccatgatccaatcatct

SEQ ID NO: 1886 - DNA, 122 bp, Homo sapiens
  misc_feature (61)..(62): /note="This region represents a CpG dinucleotide"
  misc_feature (61)..(61): /note="Nucleotide may be methylated to form 5-methylcytosine"
ggcgtgaaagcaaaggtcagcgcaaatgtatcttaatagagtgtctgtagtgaagtgtgccgcctttgaagcggccgctccccgcgcgtatttccatggcgagcctaacgcggcatgctgat

SEQ ID NO: 1887 - DNA, 122 bp, Homo sapiens
  misc_feature (61)..(62): /note="This region represents a CpG dinucleotide"
  misc_feature (61)..(61): /note="Nucleotide may be methylated to form 5-methylcytosine"
aggagcaggctaaaaagctcagagaactcttcagaaaacttttgcaaacttaactacgcccgctgtggactttggacatgctaattcctatagggcggttagagaaggggaaaaaaaatccc

SEQ ID NO: 1888 - DNA, 122 bp, Homo sapiens
  misc_feature (61)..(62): /note="This region represents a CpG dinucleotide"
  misc_feature (61)..(61): /note="Nucleotide may be methylated to form 5-methylcytosine"
cctgcttcaagtgaatctttctgtgataaatttatagaacaactggtgtgacagtttttgcgcctgcctaataaatgtttgtatctgtgcatgagtcagtctgagacttgcttttattacaa

SEQ ID NO: 1889 - DNA, 122 bp, Homo sapiens
  misc_feature (61)..(62): /note="This region represents a CpG dinucleotide"
  misc_feature (61)..(61): /note="Nucleotide may be methylated to form 5-methylcytosine"
aagtggcaatcctgcaataaatgatgtggagtctctctattcctacaggaattcctatcccgctgtgttcattcctccacctgcactcctcccagcctcactccctcactaccaaagctcct

SEQ ID NO: 1890 - DNA, 122 bp, Homo sapiens
  misc_feature (61)..(62): /note="This region represents a CpG dinucleotide"
  misc_feature (61)..(61): /note="Nucleotide may be methylated to form 5-methylcytosine"
tgctactattctaggcatttccctgaaatgttcaactttccattgaccaagaaagcagctcgcccaagtgtgtgggaagcacttgggtgggacacttttctgccccatttccagaaggatta

SEQ ID NO: 1891 - DNA, 122 bp, Homo sapiens
  misc_feature (61)..(62): /note="This region represents a CpG dinucleotide"
  misc_feature (61)..(61): /note="Nucleotide may be methylated to form 5-methylcytosine"
actgcaaattcttccaaagcaatgaaagaaggcctggctctgcagagggtaatagatcctcgcagggcttccctgggccttctgcttttggatgaggagagcaacagtgcccaaagctgccc

SEQ ID NO: 1892 - DNA, 122 bp, Homo sapiens
  misc_feature (61)..(62): /note="This region represents a CpG dinucleotide"
  misc_feature (61)..(61): /note="Nucleotide may be methylated to form 5-methylcytosine"
gcggcccctggccaaccaggaaggcacaggcagggctgagtttgcatgacaggaggagctcgggctcggaggaaagcattttagacctgaggtatcgacgaagggtcaacagggatgaccag

SEQ ID NO: 1893 - DNA, 122 bp, Homo sapiens
  misc_feature (61)..(62): /note="This region represents a CpG dinucleotide"
  misc_feature (61)..(61): /note="Nucleotide may be methylated to form 5-methylcytosine"
gatgctctgagagctttgatcctcttaaaggactcaagttgtaggcccagtgggggacaacgcaaagtccatgttacaccacagcttattgcactgagccggcgttgatgctggggtttggc

SEQ ID NO: 1894 - DNA, 122 bp, Homo sapiens
  misc_feature (61)..(62): /note="This region represents a CpG dinucleotide"
  misc_feature (61)..(61): /note="Nucleotide may be methylated to form 5-methylcytosine"
tttccgcccttctagctgggtatcaagatctgagaccagatgtgctggtgagtgactcagcgctttcttgcctggaaactcctccctgtgtctcccactgggaaaacagctgtggtaaggaa

SEQ ID NO: 1895 - DNA, 122 bp, Homo sapiens
  misc_feature (61)..(62): /note="This region represents a CpG dinucleotide"
  misc_feature (61)..(61): /note="Nucleotide may be methylated to form 5-methylcytosine"
gattaatctggcagtgatgtgtaaaagactttggcttcggaagatttgttccaaggctgacgcaatccaggtgaaaggtagcaatctgtcagacctcttggtttgaacagaggaaagcacta

SEQ ID NO: 1896 - DNA, 122 bp, Homo sapiens
  misc_feature (61)..(62): /note="This region represents a CpG dinucleotide"
  misc_feature (61)..(61): /note="Nucleotide may be methylated to form 5-methylcytosine"
agatacacccagagacattgagcctgcggtggttagctgcagccggaacacggttttctgcgcagggcacaggcagcatcgctgctctccagacttggaaaagacatcaggacctgagagag

SEQ ID NO: 1897 - DNA, 122 bp, Homo sapiens
  misc_feature (61)..(62): /note="This region represents a CpG dinucleotide"
  misc_feature (61)..(61): /note="Nucleotide may be methylated to form 5-methylcytosine"
aggccttttcagtttgtcagaagttagtaaatcacataattactaaattccttaagatcgcgtcatctgaaggaatggtgtcgtgtctaaatgactgtgcttctaaggacagctgattcaca

SEQ ID NO: 1898 - DNA, 122 bp, Homo sapiens
  misc_feature (61)..(62): /note="This region represents a CpG dinucleotide"
  misc_feature (61)..(61): /note="Nucleotide may be methylated to form 5-methylcytosine"
acaactcaacattcccagtgctgttagtagtttaaggtttctccgcaatgccaggacattcgatgccaacatatgtgagtagtttagtgacttcatttctaggcttcatgccaagaatttct

SEQ ID NO: 1899 - DNA, 122 bp, Homo sapiens
  misc_feature (61)..(62): /note="This region represents a CpG dinucleotide"
  misc_feature (61)..(61): /note="Nucleotide may be methylated to form 5-methylcytosine"
taatgaaaccagatgggtaagtcatttcctgagcaacaggtatcaggagaaaagaaagagcgaatcgaggacaagtattttagtggcacatatgctgcgcctcttagtcactctggataatg

SEQ ID NO: 1900 - DNA, 122 bp, Homo sapiens
  misc_feature (61)..(62): /note="This region represents a CpG dinucleotide"
  misc_feature (61)..(61): /note="Nucleotide may be methylated to form 5-methylcytosine"
ggagtgaaacagtgagagatcctgtttgtagttctgtgcagacaaacccagaaaccagaacgcagacacaccaggacgcaacaggaaaccacaaaggcctgagatctttcaatgtaaatagg

SEQ ID NO: 1901 - DNA, 122 bp, Homo sapiens
  misc_feature (61)..(62): /note="This region represents a CpG dinucleotide"
  misc_feature (61)..(61): /note="Nucleotide may be methylated to form 5-methylcytosine"
ttcttagctgcatccctataaaataggattaataaaaatacctacctgatagggtagcagcgaggatgagattatgtcaagtgcttagaacagtgccggacatacagtaatcagctctcatg

SEQ ID NO: 1902 - DNA, 122 bp, Homo sapiens
  misc_feature (61)..(62): /note="This region represents a CpG dinucleotide"
  misc_feature (61)..(61): /note="Nucleotide may be methylated to form 5-methylcytosine"
catttccctcgcagttccattaggatgtaccaattgttaggccgtcagctgccgatcgcgcgcccggcgaggatgcagaggattggggggaggtggtgacttgcattttatttacaacaact

SEQ ID NO: 1903 - DNA, 122 bp, Homo sapiens
  misc_feature (61)..(62): /note="This region represents a CpG dinucleotide"
  misc_feature (61)..(61): /note="Nucleotide may be methylated to form 5-methylcytosine"
gggcaggaggccttactttcttgccatgtagtcatcttcatagatctgcttgagtgtcctcgtgacatggcagctgacttccttcacagtgagtgatccaaggaagagagtaaacaggaaac

SEQ ID NO: 1904 - DNA, 122 bp, Homo sapiens
  misc_feature (61)..(62): /note="This region represents a CpG dinucleotide"
  misc_feature (61)..(61): /note="Nucleotide may be methylated to form 5-methylcytosine"
aggttatatatttttgttacatctcttttaattttggtttctacatgtttgttgttagtacggtatatagttatgtaattgatctttgtgtgttgatcttgtatcctgtgaccctgctaaac

SEQ ID NO: 1905 - DNA, 122 bp, Homo sapiens
  misc_feature (61)..(62): /note="This region represents a CpG dinucleotide"
  misc_feature (61)..(61): /note="Nucleotide may be methylated to form 5-methylcytosine"
gtctctaattaagccggttgtcaatttgccaagcagtcagcaaaagtgcccataacttcacgcagtagaagatgagctcctgagttgaatgactgcctagctgttttcaggattattttaat

SEQ ID NO: 1906 - DNA, 122 bp, Homo sapiens
  misc_feature (61)..(62): /note="This region represents a CpG dinucleotide"
  misc_feature (61)..(61): /note="Nucleotide may be methylated to form 5-methylcytosine"
aggagctgtgcgggcggagcgcggaatgtagcatccacgtggaggtgatcgtggacaggccgctgcaggttttccatgtggaagtggaggtgaaggacattaacgacaacccgccaatattt

SEQ ID NO: 1907 - DNA, 122 bp, Homo sapiens
  misc_feature (61)..(62): /note="This region represents a CpG dinucleotide"
  misc_feature (61)..(61): /note="Nucleotide may be methylated to form 5-methylcytosine"
agctggttggccatgtggtgaaagtggatccttcagtcctagtcaagccaccccagctgacgctgcatgcaacagagacaagctgtctccacccaggcctgcccacattgttgttttaaacc

SEQ ID NO: 1908 - DNA, 122 bp, Homo sapiens
  misc_feature (61)..(62): /note="This region represents a CpG dinucleotide"
  misc_feature (61)..(61): /note="Nucleotide may be methylated to form 5-methylcytosine"
gggaggggaggggagggggcccctggcgggcttccggggccctgagggcgagagcgagggcgacggcaaggtggggtgggggctgctccccggcccgccaagctagcgctgcctaggcggga

SEQ ID NO: 1909 - DNA, 122 bp, Homo sapiens
  misc_feature (61)..(62): /note="This region represents a CpG dinucleotide"
  misc_feature (61)..(61): /note="Nucleotide may be methylated to form 5-methylcytosine"
gttccaagagaaagactgtgaaacagcaggcccacaggagctggagagcgagctttgaaacgatacaaaattaattgtctaaggggcaaataaatggtgcagtacacaaatgcaggaggtga

SEQ ID NO: 1910 - DNA, 122 bp, Homo sapiens
  misc_feature (61)..(62): /note="This region represents a CpG dinucleotide"
  misc_feature (61)..(61): /note="Nucleotide may be methylated to form 5-methylcytosine"
atgtgacgctgcgacggggcgtcccggggcagggccctgccaagggacccccaacaaacacgactgaaactcagcctggatacaaagtccacatggaggcactgccagagacgcctgccggg

SEQ ID NO: 1911 - DNA, 122 bp, Homo sapiens
  misc_feature (61)..(62): /note="This region represents a CpG dinucleotide"
  misc_feature (61)..(61): /note="Nucleotide may be methylated to form 5-methylcytosine"
gccatgcccggcctgcccgccgctcccggcccgcgccccgcccctcgctgtgcccgccctcgccccgccccgcgccacccggagccccgccccctccgggaaccccgccctgcaccgccgcg

SEQ ID NO: 1912 - DNA, 122 bp, Homo sapiens
  misc_feature (61)..(62): /note="This region represents a CpG dinucleotide"
  misc_feature (61)..(61): /note="Nucleotide may be methylated to form 5-methylcytosine"
ttaatatttatagagcaggatgtgagctaaactgttctgctttcttcagcagaccctagacgagaaaaaaattttaaaagatagtttaaagtaacaaatgtgttagttgttataataaccca

SEQ ID NO: 1913 - DNA, 122 bp, Homo sapiens
  misc_feature (61)..(62): /note="This region represents a CpG dinucleotide"
  misc_feature (61)..(61): /note="Nucleotide may be methylated to form 5-methylcytosine"
gaagctcaacaaactccatgtaggataaactcagagatccacacatagacacatcataatcgaaactgtcaaaagccacaaaatcttgaaagcagtgacagaaaaatgactcagtgtgtaca

SEQ ID NO: 1914 - DNA, 122 bp, Homo sapiens
  misc_feature (61)..(62): /note="This region represents a CpG dinucleotide"
  misc_feature (61)..(61): /note="Nucleotide may be methylated to form 5-methylcytosine"
caaagcagcatggagcgtgggcctggagaggaaagtgggagacgcccacaaccctttccccgaccaaccctaaccccagtctagatcagcagcttctcctgttagggcctcctataccctgt

SEQ ID NO: 1915 - DNA, 122 bp, Homo sapiens
  misc_feature (61)..(62): /note="This region represents a CpG dinucleotide"
  misc_feature (61)..(61): /note="Nucleotide may be methylated to form 5-methylcytosine"
gacggggtttcactatgttggccaggctggtctcaaactcctgaccccaagtgatccgcccgcctcggccgcccaaagcactgggataacaggcgtaagccaactggcccggcccagaagaa

SEQ ID NO: 1916 - DNA, 122 bp, Homo sapiens
  misc_feature (61)..(62): /note="This region represents a CpG dinucleotide"
  misc_feature (61)..(61): /note="Nucleotide may be methylated to form 5-methylcytosine"
gcacagcgtcggccggggccaggccgagccaggccacccctgttttccgcgccattggcccgcccggcccgccccaaccgacggcgccctcctgacccaggcagcctagcgctggggcccaa

SEQ ID NO: 1917 - DNA, 122 bp, Homo sapiens
  misc_feature (61)..(62): /note="This region represents a CpG dinucleotide"
  misc_feature (61)..(61): /note="Nucleotide may be methylated to form 5-methylcytosine"
agtgttgggattacaggtgtgagccaccgcacccggcctctgagaaatatttagattgtacgcctcaaatgggcagggactgtgtcttacacttttgtatttatgctacagcttacctaata

SEQ ID NO: 1918 - DNA, 122 bp, Homo sapiens
  misc_feature (61)..(62): /note="This region represents a CpG dinucleotide"
  misc_feature (61)..(61): /note="Nucleotide may be methylated to form 5-methylcytosine"
tgctccctcacagctgaataacccttgcttttcaaagcaccttcacaaatatctctgtggcgcttcctgatattcttgtgtggtggtgagggcattatgcggtattgcaggaagagttacaa

SEQ ID NO: 1919 - DNA, 122 bp, Homo sapiens
  misc_feature (61)..(62): /note="This region represents a CpG dinucleotide"
  misc_feature (61)..(61): /note="Nucleotide may be methylated to form 5-methylcytosine"
cctcagagccctcaacctcccttggacgccgccatcttccgcatgacacctacggcgcgccgtcgccgccgcgcgcctcctgcgcacacccccagtcaatcagcatcacaaacgcacctcgc

SEQ ID NO: 1920 - DNA, 122 bp, Homo sapiens
  misc_feature (61)..(62): /note="This region represents a CpG dinucleotide"
  misc_feature (61)..(61): /note="Nucleotide may be methylated to form 5-methylcytosine"
gctaaggagtgtttggtcagccttaaggtctctgttttagtgttaattgctggtcatctgcgcctgaattcccaagggaggaatgtataatgaggcatgtctgagcacccattcccattatg

SEQ ID NO: 1921 - DNA, 122 bp, Homo sapiens
  misc_feature (61)..(62): /note="This region represents a CpG dinucleotide"
  misc_feature (61)..(61): /note="Nucleotide may be methylated to form 5-methylcytosine"
atagtaaatatttttggtctcataggccatatagtctctgttgcaattactcagttctgccgctgtagcacaaaagcagccaaggacgttgtggtaaatgaatgtgttcctataaaacttta

SEQ ID NO: 1922 - DNA, 122 bp, Homo sapiens
  misc_feature (61)..(62): /note="This region represents a CpG dinucleotide"
  misc_feature (61)..(61): /note="Nucleotide may be methylated to form 5-methylcytosine"
cacacacaagcaccagaattattcagactcactaatcttgcagtgctttgcttcgtgcttcgtgggtagcagtgatcaaccaagtcctgaacttttgactgttatttgagatgaagtagcca

SEQ ID NO: 1923 - DNA, 122 bp, Homo sapiens
  misc_feature (61)..(62): /note="This region represents a CpG dinucleotide"
  misc_feature (61)..(61): /note="Nucleotide may be methylated to form 5-methylcytosine"
cgtgcagccacttcagtgaggcaatgtgtgctctcttctactatccactatcgcctccaccgccctcaatgagcagaagcaacgtgaccttagtttcaagggcaactacaaaagcaagttaa

SEQ ID NO: 1924 - DNA, 122 bp, Homo sapiens
  misc_feature (61)..(62): /note="This region represents a CpG dinucleotide"
  misc_feature (61)..(61): /note="Nucleotide may be methylated to form 5-methylcytosine"
ctttatacaaaggctcagctatgtcaaggagaaagtagtcatgctagagatatctgcttacgtggcttgttcttggtcttgcactcctggataaggatggctatacatgatgatgccttaaa

SEQ ID NO: 1925 - DNA, 122 bp, Homo sapiens
  misc_feature (61)..(62): /note="This region represents a CpG dinucleotide"
  misc_feature (61)..(61): /note="Nucleotide may be methylated to form 5-methylcytosine"
tccgtaggggacaccgagccaaggcctgcagcgagtgacctgcccggggaggcgcgggaccgaggctcacctacccgggcccgcgagtctcgcccagccccagcctcccaacccactctgcc

SEQ ID NO: 1926 - DNA, 122 bp, Homo sapiens
  misc_feature (61)..(62): /note="This region represents a CpG dinucleotide"
  misc_feature (61)..(61): /note="Nucleotide may be methylated to form 5-methylcytosine"
atgatttacattatcgactataggtggcaccaccaggctgtggcaccccagtttacaagacgcaggcactgtggggtactggtaagagacagtaactatgacaacatgactgtctttctggg

SEQ ID NO: 1927 - DNA, 122 bp, Homo sapiens
  misc_feature (61)..(62): /note="This region represents a CpG dinucleotide"
  misc_feature (61)..(61): /note="Nucleotide may be methylated to form 5-methylcytosine"
tgagtaagggccacaggacctgatgagccagtttaccagactgggtggtggcaactggtccgtcagaatgcagggtatgaaaaacacctcaaacacaaatcttaagttttacaatagtggtg

SEQ ID NO: 1928 - DNA, 122 bp, Homo sapiens
  misc_feature (61)..(62): /note="This region represents a CpG dinucleotide"
  misc_feature (61)..(61): /note="Nucleotide may be methylated to form 5-methylcytosine"
tggcacaacacaagagctcccaggggaaaagcctccatttgaagtgcctgtaaagtaatgcggaatgtgtcagatgattcatgtgcgtaaatatcagttggcagacaaggaaatgtcatttt

SEQ ID NO: 1929 - DNA, 122 bp, Homo sapiens
  misc_feature (61)..(62): /note="This region represents a CpG dinucleotide"
  misc_feature (61)..(61): /note="Nucleotide may be methylated to form 5-methylcytosine"
agcgcccctaacccgccgccagctattggacccgggatggcgcccctaacaccctcccctcgccgctgcagtgtagaaacccaatagcgtcccgaacccgtccccgcctcagacgttgcagc

SEQ ID NO: 1930 - DNA, 122 bp, Homo sapiens
  misc_feature (61)..(62): /note="This region represents a CpG dinucleotide"
  misc_feature (61)..(61): /note="Nucleotide may be methylated to form 5-methylcytosine"
gctttcagacgtcaagccttctaatgtactcatcaatgctctcggtcaagtgaagatgtgcgattttggaatcagtggctacttggtggactctgttgctaaaacaattgatgcaggttgca

SEQ ID NO: 1931 - DNA, 122 bp, Homo sapiens
  misc_feature (61)..(62): /note="This region represents a CpG dinucleotide"
  misc_feature (61)..(61): /note="Nucleotide may be methylated to form 5-methylcytosine"
ccgtctattaaattataggcattattcccagatttttatacacttaccttatgcaagcctcgtaacaatcccatcttttatagatgagcaaactgaggctcagacgagttaaaaacacattg

SEQ ID NO: 1932 - DNA, 122 bp, Homo sapiens
  misc_feature (61)..(62): /note="This region represents a CpG dinucleotide"
  misc_feature (61)..(61): /note="Nucleotide may be methylated to form 5-methylcytosine"
ggcccagtagtgcacgcaggtaatcccagcactttggggggccacggtgggaggagcccacgagtccaggagttaaagatgagcctgggcaacatagcaacatcccatctctacaaaaaaaa

SEQ ID NO: 1933 - DNA, 122 bp, Homo sapiens
  misc_feature (61)..(62): /note="This region represents a CpG dinucleotide"
  misc_feature (61)..(61): /note="Nucleotide may be methylated to form 5-methylcytosine"
caaaagcaagtatcatgtctgatttaacagggtatattctattcttttttttccacaaggcggtgcccggttcggtcccagacgcggccaccaaccgacgtaaagccggtgagccgctcggg

SEQ ID NO: 1934 - DNA, 122 bp, Homo sapiens
  misc_feature (61)..(62): /note="This region represents a CpG dinucleotide"
  misc_feature (61)..(61): /note="Nucleotide may be methylated to form 5-methylcytosine"
attttctttctttttttttttttttttttttttttttgtagagatggggtctctctctgtcgcctaggaaggtctccaatttctgggctcaaaggatcctcacaaagtgctgggattacagg

SEQ ID NO: 1935 - DNA, 122 bp, Homo sapiens
  misc_feature (61)..(62): /note="This region represents a CpG dinucleotide"
  misc_feature (61)..(61): /note="Nucleotide may be methylated to form 5-methylcytosine"
cgggccaaattgaggactagctaaaacagggatggggtgggagtgcctctccatgagatacgcccactcgtatgccatgtcagtttaccattgccgtggcaacacctggagttacctttcca

SEQ ID NO: 1936 - DNA, 122 bp, Homo sapiens
  misc_feature (61)..(62): /note="This region represents a CpG dinucleotide"
  misc_feature (61)..(61): /note="Nucleotide may be methylated to form 5-methylcytosine"
ctcttctcattcacgatgtgggttatgcttcagactctcaacgatgaggttccaaaataccgtgaccagattcctagcccaggtaattatcttgcagttatgactttgttttttgttttttg

SEQ ID NO: 1937 - DNA, 122 bp, Homo sapiens
  misc_feature (61)..(62): /note="This region represents a CpG dinucleotide"
  misc_feature (61)..(61): /note="Nucleotide may be methylated to form 5-methylcytosine"
agagccctctaccctctccttgagtcatacatgcttttttttttttttttttttttgagacggagtctcatttgtttgcccaggctgtagtgaagtggcaggatctcagctcactgcaacct

SEQ ID NO: 1938 - DNA, 122 bp, Homo sapiens
  misc_feature (61)..(62): /note="This region represents a CpG dinucleotide"
  misc_feature (61)..(61): /note="Nucleotide may be methylated to form 5-methylcytosine"
ccgactgcgacacacgaatggacagtcaactgtcgctcccgcctcaccatgcagagcacgcgcccatccaacactaggcagagccaccgccttttgtagaacaattgtgcaggctccaaagc

SEQ ID NO: 1939 - DNA, 122 bp, Homo sapiens
  misc_feature (61)..(62): /note="This region represents a CpG dinucleotide"
  misc_feature (61)..(61): /note="Nucleotide may be methylated to form 5-methylcytosine"
ggagaaacagaaggcaccgagacagaatgtgcaggcagacacaggaaaggagacactgaacgggtcaaaagcacgtctgaaaggaccctggccaagaactaccccaaatggctaaaagacac

SEQ ID NO: 1940 - DNA, 122 bp, Homo sapiens
  misc_feature (61)..(62): /note="This region represents a CpG dinucleotide"
  misc_feature (61)..(61): /note="Nucleotide may be methylated to form 5-methylcytosine"
gtgtacaccctttgatattattcgtattttcctgaagagatgttactactcatgtcccaacgcaggtacattctctgatgttattcgctatatcctggggggatgttacttctaatgtcaca

SEQ ID NO: 1941 - DNA, 122 bp, Homo sapiens
  misc_feature (61)..(62): /note="This region represents a CpG dinucleotide"
  misc_feature (61)..(61): /note="Nucleotide may be methylated to form 5-methylcytosine"
ttttgctttattcagcctttattcaagatggagtcactctggtttggactcctctgacagcgggagtgaagtagaagtgatagggtttctttacagttcttatatccaactatttgatttag

SEQ ID NO: 1942 - DNA, 122 bp, Homo sapiens
  misc_feature (61)..(62): /note="This region represents a CpG dinucleotide"
  misc_feature (61)..(61): /note="Nucleotide may be methylated to form 5-methylcytosine"
gtgtggaaatcagttctgtagcgcatgtagcgaatcactttccagccatagtagtgtacccgcaatgcggctcactcctcatgagggagcctgtttcattgttagagcacaacctaattaag

SEQ ID NO: 1943 - DNA, 122 bp, Homo sapiens
  misc_feature (61)..(62): /note="This region represents a CpG dinucleotide"
  misc_feature (61)..(61): /note="Nucleotide may be methylated to form 5-methylcytosine"
tgaagagctaattcttccctctaataataatactctttgaccatttactatatgtcaaaccgtattttaaggactttaaaggtattaattcgtttaatcttcacagcaatcctgtgagtagg

SEQ ID NO: 1944 - DNA, 122 bp, Homo sapiens
  misc_feature (61)..(62): /note="This region represents a CpG dinucleotide"
  misc_feature (61)..(61): /note="Nucleotide may be methylated to form 5-methylcytosine"
tgaagagaaaaatgaaccctagggctcagagtactgcagcagatcatttggtattgcttccgtggagtgtagcgagccaactaaatactttgacgccagtgggaatagtgataattatggta

SEQ ID NO: 1945 - DNA, 122 bp, Homo sapiens
  misc_feature (61)..(62): /note="This region represents a CpG dinucleotide"
  misc_feature (61)..(61): /note="Nucleotide may be methylated to form 5-methylcytosine"
ctcctgggcgcgcattcttaacttggcaaatacacctcctaaaatgattgagacttgtctcgtcatgtttcttgattgacagaagctaacacagagaacatttttagatgagaaacccaata

SEQ ID NO: 1946 - DNA, 122 bp, Homo sapiens
  misc_feature (61)..(62): /note="This region represents a CpG dinucleotide"
  misc_feature (61)..(61): /note="Nucleotide may be methylated to form 5-methylcytosine"
acttactagagttcaacaataaaacttacttgattccgtggatgaagcccaggaataggacgagactgtcagttttgagcattacaagtgagaaaatgaagaagggtttattttgaaggctg

SEQ ID NO: 1947 - DNA, 122 bp, Homo sapiens
  misc_feature (61)..(62): /note="This region represents a CpG dinucleotide"
  misc_feature (61)..(61): /note="Nucleotide may be methylated to form 5-methylcytosine"
agaaaaggaaaggagtccaattcatggtggcaagaattaattagcaaaagaaatgcacagcgattgtaaaaagagttttacacgtagatcataatgttgtcttcactttctttcccacaagt

SEQ ID NO: 1948 - DNA, 122 bp, Homo sapiens
  misc_feature (61)..(62): /note="This region represents a CpG dinucleotide"
  misc_feature (61)..(61): /note="Nucleotide may be methylated to form 5-methylcytosine"
ttcctgctcatgccactaacagcatgctgccaaactgttcagattcaagattattccaagcgcagggcccaaatgttatagccaaagaaagtcttatgataaaagtgaggcaaatttcagcc

SEQ ID NO: 1949 - DNA, 122 bp, Homo sapiens
  misc_feature (61)..(62): /note="This region represents a CpG dinucleotide"
  misc_feature (61)..(61): /note="Nucleotide may be methylated to form 5-methylcytosine"
tgggaggggcgcttgcacagtgtgtttactgaagctgcgcacatgctcacttgaggcgttcgtcccttaccagtccagtgttcctagaggaaggtcatataccagttaaactctgccatttt

SEQ ID NO: 1950 - DNA, 122 bp, Homo sapiens
  misc_feature (61)..(62): /note="This region represents a CpG dinucleotide"
  misc_feature (61)..(61): /note="Nucleotide may be methylated to form 5-methylcytosine"
taagtatttaattaaatcagacttttccacggggatcagagaatatttaagactgaatcccggttgaaggactcttgggcaatcaccacagcaaggaaaccaagagttagattttttttttt

SEQ ID NO: 1951 - DNA, 122 bp, Homo sapiens
  misc_feature (61)..(62): /note="This region represents a CpG dinucleotide"
  misc_feature (61)..(61): /note="Nucleotide may be methylated to form 5-methylcytosine"
tgcatatttatatataccaagtatttccaaacagccttgtgtttgttttaaaatcccacacggagatgtctggtaaagctgtcactgcagaaacttcatggtgaagtttgtaagactacttt

SEQ ID NO: 1952 - DNA, 122 bp, Homo sapiens
  misc_feature (61)..(62): /note="This region represents a CpG dinucleotide"
  misc_feature (61)..(61): /note="Nucleotide may be methylated to form 5-methylcytosine"
tttcattcagggtctggctccgtctcagtaactccttggggaaagcgatggagaagggctcgctcacgcagcacttctggcagtccctgaaggaccactacctcaagtctcccaggctggag

SEQ ID NO: 1953 - DNA, 122 bp, Homo sapiens
  misc_feature (61)..(62): /note="This region represents a CpG dinucleotide"
  misc_feature (61)..(61): /note="Nucleotide may be methylated to form 5-methylcytosine"
aagttaatctcagactctgtgacacgtggaataaaatcacgctcccataatgggatcattcgtcttcctgtccaaggagagaaccaacccttcaccctccgccctgggggagccagtggggc

SEQ ID NO: 1954 - DNA, 122 bp, Homo sapiens
  misc_feature (61)..(62): /note="This region represents a CpG dinucleotide"
  misc_feature (61)..(61): /note="Nucleotide may be methylated to form 5-methylcytosine"
aaaagccaaggaggaattttcctgcttgtcttagcatttggcttggctttgctttttccgcgtgcatcaaaggccaagatctagtttgaatgtggaaagttgatgacagtcaataaaaggat

SEQ ID NO: 1955 - DNA, 122 bp, Homo sapiens
  misc_feature (61)..(62): /note="This region represents a CpG dinucleotide"
  misc_feature (61)..(61): /note="Nucleotide may be methylated to form 5-methylcytosine"
tcggcgaagggtatctccgaggagcagctttcaggcgctccctgggctctcgcagtccagcgcgttcagaagctccagctgggaaactggagttggcctgaaagcagctccaggatctcccg

SEQ ID NO: 1956 - DNA, 122 bp, Homo sapiens
  misc_feature (61)..(62): /note="This region represents a CpG dinucleotide"
  misc_feature (61)..(61): /note="Nucleotide may be methylated to form 5-methylcytosine"
agagagaaaaggaggccaggcacagcggctcgcacctgtaatcccagcactttgggaggccgaggcgggagccccggagttcaagaccatcctggtcaacacagtgagaccctcatctctaa

SEQ ID NO: 1957 - DNA, 122 bp, Homo sapiens
  misc_feature (61)..(62): /note="This region represents a CpG dinucleotide"
  misc_feature (61)..(61): /note="Nucleotide may be methylated to form 5-methylcytosine"
ggattccacctccttccctcctgggtgaggagcgggcagcgtggataattccctcggaggcgccccaacccaaatctacatacataaagcccaggctggcgttttgagtgatcggtttatta

SEQ ID NO: 1958 - DNA, 122 bp, Homo sapiens
  misc_feature (61)..(62): /note="This region represents a CpG dinucleotide"
  misc_feature (61)..(61): /note="Nucleotide may be methylated to form 5-methylcytosine"
tcccgcccctttggccccgcccctcggccgtccttccccgcccgtggccccgcccccctccggcgtccgtctgccgcctcaccgcttggccccgcccctcgccacctgcccggccaggcgcg

SEQ ID NO: 1959 - DNA, 122 bp, Homo sapiens
  misc_feature (61)..(62): /note="This region represents a CpG dinucleotide"
  misc_feature (61)..(61): /note="Nucleotide may be methylated to form 5-methylcytosine"
gcatccctctgtacttgaatttcattctgcttcatgtagccaggcttcttttaccagggtcgtcatttcagttcctgggtaaacttcagctttacgtgagcccctgccctgctgtgaagcaa

SEQ ID NO: 1960 - DNA, 122 bp, Homo sapiens
  misc_feature (61)..(62): /note="This region represents a CpG dinucleotide"
  misc_feature (61)..(61): /note="Nucleotide may be methylated to form 5-methylcytosine"
gggcctttaggagcggacgacacacagcagtaaggacgacaccttgacctccgcgtgcagcgagagccaacggtcctaccacatcccggaagccgccctgtccgctccagctgcgtgcctga

SEQ ID NO: 1961 - DNA, 122 bp, Homo sapiens
  misc_feature (61)..(62): /note="This region represents a CpG dinucleotide"
  misc_feature (61)..(61): /note="Nucleotide may be methylated to form 5-methylcytosine"
gagcaaatagttgtagcagtttcttccagatggctagattacaccacaggcagtatgtaccgcaagtagcagctgcactgacagcttcctgatttcctagctttctaattacatttagggac

SEQ ID NO: 1962 - DNA, 122 bp, Homo sapiens
  misc_feature (61)..(62): /note="This region represents a CpG dinucleotide"
  misc_feature (61)..(61): /note="Nucleotide may be methylated to form 5-methylcytosine"
caaatatgcagtgagaccttgatcctgtcttaacatttgatctcagacagacaaatgacacgtaaaaacacaaggtcagagtgaattagaggcaggagaatgaaacacactgatacagaatg

SEQ ID NO: 1963 - DNA, 122 bp, Homo sapiens
  misc_feature (61)..(62): /note="This region represents a CpG dinucleotide"
  misc_feature (61)..(61): /note="Nucleotide may be methylated to form 5-methylcytosine"
gctcggaaactgacattcgctacaaatcagggctctcctgactcccagcctgttggtaaacgtttcccagcacatcattgtctccatctgcccacttgctgcttaggagacttttgaagatg

SEQ ID NO: 1964 - DNA, 122 bp, Homo sapiens
  misc_feature (61)..(62): /note="This region represents a CpG dinucleotide"
  misc_feature (61)..(61): /note="Nucleotide may be methylated to form 5-methylcytosine"
aatattacaaagaactcccagaatgtcctttacccagattcaccaattaacattttatcacgtttgccttatcattctgtttttctcttcctctcctccttctcctatttgacagtagtttg

SEQ ID NO: 1965 - DNA, 122 bp, Homo sapiens
  misc_feature (61)..(62): /note="This region represents a CpG dinucleotide"
  misc_feature (61)..(61): /note="Nucleotide may be methylated to form 5-methylcytosine"
tgatatatgcaaaacacagtgcctggcgcaaggagatgttcaataaatactagtccccttcgcgtttatttttttgtttcagccagatcatgacaagagaatttcaaagccataaagtcata

SEQ ID NO: 1966 - DNA, 122 bp, Homo sapiens
  misc_feature (61)..(62): /note="This region represents a CpG dinucleotide"
  misc_feature (61)..(61): /note="Nucleotide may be methylated to form 5-methylcytosine"
ggcagagggagcggtagccagccccgcaggggcgggcggggacggggtgggggtgcgctgcggcagccgcgggagtcagggagagaggaggggccgggtggcttaccctgcgagaccctggg

SEQ ID NO: 1967 - DNA, 122 bp, Homo sapiens
  misc_feature (61)..(62): /note="This region represents a CpG dinucleotide"
  misc_feature (61)..(61): /note="Nucleotide may be methylated to form 5-methylcytosine"
gttgggctgagtcctccctgaggatgcaaacacacacacacggacacacacacacacacacggacacacacaaacacacctcgctggttgggctgagtcctccctgaggacacacacagaca

SEQ ID NO: 1968 - DNA, 122 bp, Homo sapiens
  misc_feature (61)..(62): /note="This region represents a CpG dinucleotide"
  misc_feature (61)..(61): /note="Nucleotide may be methylated to form 5-methylcytosine"
tcagccccagggcaccagctgtgccacacaagaccatgtgtccaagggatgtggcctcagcgtccaacacaaacatggccactggcattgtgccaggtgcaggagacagacagcagagacaa

SEQ ID NO: 1969 - DNA, 122 bp, Homo sapiens
  misc_feature (61)..(62): /note="This region represents a CpG dinucleotide"
  misc_feature (61)..(61): /note="Nucleotide may be methylated to form 5-methylcytosine"
tctgttccaggagccaatccaggataccacattgcatttagtaagcacattttacaattacgatataggcattaaaaggtctggaacgaggcccagcgcggtggctcatgcctgtaatccca

SEQ ID NO: 1970 - DNA, 122 bp, Homo sapiens
  misc_feature (61)..(62): /note="This region represents a CpG dinucleotide"
  misc_feature (61)..(61): /note="Nucleotide may be methylated to form 5-methylcytosine"
aacatcatcttagtaaaagtttatcaaatcacatagaattgaataaaaatatacagtctccgccttcaaggagtctagttgaggaacaggacagatacatgtaagacaattggccatgtaag

SEQ ID NO: 1971 - DNA, 122 bp, Homo sapiens
  misc_feature (61)..(62): /note="This region represents a CpG dinucleotide"
  misc_feature (61)..(61): /note="Nucleotide may be methylated to form 5-methylcytosine"
atgggtcccatggtgttattcaaggtttatggtattgcactaaccacagtgtaaactccacgagcaccacgagagatcgctttttactgtgatgtgcaatttactgcagaaacgaactgctc

SEQ ID NO: 1972 - DNA, 122 bp, Homo sapiens
  misc_feature (61)..(62): /note="This region represents a CpG dinucleotide"
  misc_feature (61)..(61): /note="Nucleotide may be methylated to form 5-methylcytosine"
agctgtttggcctagccaaggttgggtaataaaagatttaaaaggactttttaaaacaagcgctatagttaaaactcaggtacattaaaagtggatatttggccaggcatcgtggctcatgc

SEQ ID NO: 1973 - DNA, 122 bp, Homo sapiens
  misc_feature (61)..(62): /note="This region represents a CpG dinucleotide"
  misc_feature (61)..(61): /note="Nucleotide may be methylated to form 5-methylcytosine"
tttggtgactgtccagctagcaggctgtagggctactcctgcatttagcatagtcatctgcgtctaagaaactatgacctgacatttacgaagtctcatgtttgctaagtggacttacagac

SEQ ID NO: 1974 - DNA, 122 bp, Homo sapiens
  misc_feature (61)..(62): /note="This region represents a CpG dinucleotide"
  misc_feature (61)..(61): /note="Nucleotide may be methylated to form 5-methylcytosine"
gtctgagcctccagtcgataagtttgaacatgtttacacccgtgcagctattactacaatcgatatgatagacatctccagcactcccaagagttttcttgtgcttctttgtaatgcattcc

SEQ ID NO: 1975 - DNA, 122 bp, Homo sapiens
  misc_feature (61)..(62): /note="This region represents a CpG dinucleotide"
  misc_feature (61)..(61): /note="Nucleotide may be methylated to form 5-methylcytosine"
tcttgatgcttggggattcctttttaaaatgccctgacttgccacattgataacaactagcggatgcacctcggggatcatggactttgcaagtctgcaaagctgctagtagagcctctatc

SEQ ID NO: 1976 - DNA, 122 bp, Homo sapiens
  misc_feature (61)..(62): /note="This region represents a CpG dinucleotide"
  misc_feature (61)..(61): /note="Nucleotide may be methylated to form 5-methylcytosine"
agagaaggcggtacttcaagaagcagtcgcagaccctggttagggcgggtgtcgagtcgccgacctggagtcagatcatctacttataaattttggttttggtacttactgtgtgacttcgg

SEQ ID NO: 1977 - DNA, 122 bp, Homo sapiens
  misc_feature (61)..(62): /note="This region represents a CpG dinucleotide"
  misc_feature (61)..(61): /note="Nucleotide may be methylated to form 5-methylcytosine"
aatgcctcctgtcaaggagagccatttctgaggccctccccaaccagaaaaaaaatctaacggtgaactggaattctagatttagtaaagctgacttcatgagagatgaataaaatatactt

SEQ ID NO: 1978 - DNA, 122 bp, Homo sapiens
  misc_feature (61)..(62): /note="This region represents a CpG dinucleotide"
  misc_feature (61)..(61): /note="Nucleotide may be methylated to form 5-methylcytosine"
aatttacagttttattccttttattagtttcccattgctgtgataacaaattaccacaaacgtaatgggttaaaacaacaggaatttattctctcatagttctagagaccagaattccaaaa

SEQ ID NO: 1979 - DNA, 122 bp, Homo sapiens
  misc_feature (61)..(62): /note="This region represents a CpG dinucleotide"
  misc_feature (61)..(61): /note="Nucleotide may be methylated to form 5-methylcytosine"
gcaaagggctaaccccacgtgtccctacaatggtgcatctcccgcgtggttaaaccccatcgtgcatgccaaggtaaagtccactggtgcctccgacactgttacctgtagtttgtggggac

SEQ ID NO: 1980 - DNA, 122 bp, Homo sapiens
  misc_feature (61)..(62): /note="This region represents a CpG dinucleotide"
  misc_feature (61)..(61): /note="Nucleotide may be methylated to form 5-methylcytosine"
cgggagctggggttgcgagtggtgctcactggctggcgcgggttccaggtgagcgcggctcggcaagccccgcactcagcgcggttggccagcgcctgctgggcttgatgggggacgagctc

SEQ ID NO: 1981 - DNA, 122 bp, Homo sapiens
  misc_feature (61)..(62): /note="This region represents a CpG dinucleotide"
  misc_feature (61)..(61): /note="Nucleotide may be methylated to form 5-methylcytosine"
caagccatccttgtatcggcctcccaggtagcttagtctacagctgtgtgccaccacacccggctaatttttgtagaaactgggtttcaccccgttgcccaggctggtttcgaactcttgag

SEQ ID NO: 1982 - DNA, 122 bp, Homo sapiens
  misc_feature (61)..(62): /note="This region represents a CpG dinucleotide"
  misc_feature (61)..(61): /note="Nucleotide may be methylated to form 5-methylcytosine"
gaattagtacccaaggttctttgtcctgcatccaagaaaattaaggaacatggacacaaacgtgagcttggagcaaaagttcagtaagcaaaagaagaaagctgtctccactgtggagaggg

SEQ ID NO: 1983 - DNA, 122 bp, Homo sapiens
  misc_feature (61)..(62): /note="This region represents a CpG dinucleotide"
  misc_feature (61)..(61): /note="Nucleotide may be methylated to form 5-methylcytosine"
gttttggtgttttggccagcttctttactgcaacctgtttcatcagcagggcctctatgacgtgtatcttgtgccgacctcctatctcgtcctgtgactcagaatgtctaaccgtctggaaa

SEQ ID NO: 1984 - DNA, 122 bp, Homo sapiens
  misc_feature (61)..(62): /note="This region represents a CpG dinucleotide"
  misc_feature (61)..(61): /note="Nucleotide may be methylated to form 5-methylcytosine"
aaaagatgtgagacagatacaaatcccttcaactttcaaaaccctaaatgttaagcgctacgacacaaccgtaccttaggaaatgtgaaggttagaatgaagattgtaaacatgccttttta

SEQ ID NO: 1985 - DNA, 122 bp, Homo sapiens
  misc_feature (61)..(62): /note="This region represents a CpG dinucleotide"
  misc_feature (61)..(61): /note="Nucleotide may be methylated to form 5-methylcytosine"
cccagcgatctgggcctcgcggtccgagtccggctcccgggccgccgcccagcccttctccgcgctctcctgcgcctgggccacttccgactcctgctgtccggtccccagctcctcctcac

SEQ ID NO: 1986 - DNA, 122 bp, Homo sapiens
  misc_feature (61)..(62): /note="This region represents a CpG dinucleotide"
  misc_feature (61)..(61): /note="Nucleotide may be methylated to form 5-methylcytosine"
gcgcagtcgctccccctcgccgtcgccgctgccctcgcccgcgtccggccccggccccggcgcccccggcccacgccgacccttccagcagaagccgctgcagctctggagcaagttcgacg

SEQ ID NO: 1987 - DNA, 122 bp, Homo sapiens
  misc_feature (61)..(62): /note="This region represents a CpG dinucleotide"
  misc_feature (61)..(61): /note="Nucleotide may be methylated to form 5-methylcytosine"
aaatattggtatgaatacagtgaagattcagaacatttccatccccagaaaaatccctcacgttgctctttgatagccacactcattttcctcccacctgtgacccctgaaaagcccttggc

SEQ ID NO: 1988 - DNA, 122 bp, Homo sapiens
  misc_feature (61)..(62): /note="This region represents a CpG dinucleotide"
  misc_feature (61)..(61): /note="Nucleotide may be methylated to form 5-methylcytosine"
gctggcagatgcagcaaaactaatatgtgtaaatgctttaaagcaataatctgcttacagcgacacttccccgaacggcggcaggactgagggggaaagagaaggcgcttggcagccagggg

SEQ ID NO: 1989 - DNA, 122 bp, Homo sapiens
  misc_feature (61)..(62): /note="This region represents a CpG dinucleotide"
  misc_feature (61)..(61): /note="Nucleotide may be methylated to form 5-methylcytosine"
ccaggccgagcgcggttgctggcccgcgcctccctccccgaggcaccattgttccgggatcgctgtgaccgccacaaagtgaatcctttcggtgcggacagtcgccttcaaagccaggcccc

SEQ ID NO: 1990 - DNA, 122 bp, Homo sapiens
  misc_feature (61)..(62): /note="This region represents a CpG dinucleotide"
  misc_feature (61)..(61): /note="Nucleotide may be methylated to form 5-methylcytosine"
aacagaaaatcccattggaaatttatcttcaggtgaaaatgccgccttcctgcttttaagcgaactgcctgtgatatcatgagctcaggctgcagaggctcagccaaacaaagagaggaaag

SEQ ID NO: 1991 - DNA, 122 bp, Homo sapiens
  misc_feature (61)..(62): /note="This region represents a CpG dinucleotide"
  misc_feature (61)..(61): /note="Nucleotide may be methylated to form 5-methylcytosine"
ttttttagttggtgtattagtctgcttgggctgccaaacgaaacaccacaatctgggtggcgtaaatggaaatttattttctcatagttctggaggctagaaagtcaagatcaatgtgctgc

SEQ ID NO: 1992 - DNA, 122 bp, Homo sapiens
  misc_feature (61)..(62): /note="This region represents a CpG dinucleotide"
  misc_feature (61)..(61): /note="Nucleotide may be methylated to form 5-methylcytosine"
catctaggggtgatgggagacagagacagatcatgaggcattagattctcaaaagaagcacgcaacctggatccctcgcatgtggaatttacaacagggtttgtgctcctatgagaatttaa

SEQ ID NO: 1993 - DNA, 122 bp, Homo sapiens
  misc_feature (61)..(62): /note="This region represents a CpG dinucleotide"
  misc_feature (61)..(61): /note="Nucleotide may be methylated to form 5-methylcytosine"
cagaagatgagaaagaaagttcccgtttgtttgctccacatgtttcctttagaatgaagccgattggaagtcaacttcaccctgaagaaattcctcctggcgtttacaatgagcttctttac

SEQ ID NO: 1994 - DNA, 122 bp, Homo sapiens
  misc_feature (61)..(62): /note="This region represents a CpG dinucleotide"
  misc_feature (61)..(61): /note="Nucleotide may be methylated to form 5-methylcytosine"
tcaaaaggtaggaatttcaggtcaacaacaacagagttcacctcatgtaactacacaggtcgcacagcccatgaagtcggtcccgacaccaacatgctcctgcctcagagccaccacatgtg

SEQ ID NO: 1995 - DNA, 122 bp, Homo sapiens
  misc_feature (61)..(62): /note="This region represents a CpG dinucleotide"
  misc_feature (61)..(61): /note="Nucleotide may be methylated to form 5-methylcytosine"
acactgttggtcttaagagaggcagctccttaagatagccgacaagctgcccagtaaacacgtttgcaaatgacagcactttggcatcacgggctgactgcagtgccctagagtatttaaat

SEQ ID NO: 1996 - DNA, 122 bp, Homo sapiens
  misc_feature (61)..(62): /note="This region represents a CpG dinucleotide"
  misc_feature (61)..(61): /note="Nucleotide may be methylated to form 5-methylcytosine"
tctgggttaaaattggccccacgatttactacctatgacttcaagcaagttgcttaacctcgcacttcatcccacttcattatctcatttgtgaaatagaggtaaataattaaccctgtact

SEQ ID NO: 1997 - DNA, 122 bp, Homo sapiens
  misc_feature (61)..(62): /note="This region represents a CpG dinucleotide"
  misc_feature (61)..(61): /note="Nucleotide may be methylated to form 5-methylcytosine"
cttgctgctctccaggcaaattctcaggttctctgcccgtctgcagcatgtatgcatatgcgtgtgtgtgtgcgtgcgtgtgtgcgcgtgcgtgcgtgggcgtgtgcgcgtgtgtgggcgtg

SEQ ID NO: 1998 - DNA, 122 bp, Homo sapiens
  misc_feature (61)..(62): /note="This region represents a CpG dinucleotide"
  misc_feature (61)..(61): /note="Nucleotide may be methylated to form 5-methylcytosine"
aatctggctcctctaattttaagaacagttaatgctccaccatgccttctttgattggtacgggatttgtctaagcctacctgcatattggggaagggaagatacaggttgagtagtaatgt

SEQ ID NO: 1999 - DNA, 122 bp, Homo sapiens
  misc_feature (61)..(62): /note="This region represents a CpG dinucleotide"
  misc_feature (61)..(61): /note="Nucleotide may be methylated to form 5-methylcytosine"
tctgtataaactggtagaattgaaagttaagatatgtgcttactaatgaagaagggataacgtgcaacaaatcaggattaaatggtttaccaagtctttatgaaactaggtaattcataata

SEQ ID NO: 2000 - DNA, 122 bp, Homo sapiens
  misc_feature (61)..(62): /note="This region represents a CpG dinucleotide"
  misc_feature (61)..(61): /note="Nucleotide may be methylated to form 5-methylcytosine"
cggcgcacactgaaccgaagacctcgtaggcgggcctcggggggatgatgccgttggcggcggccagcgccagcccctcggcagtgccgtagagcagctgcagctcgcgcgcctcgttctcc

SEQ ID NO: 2001 - DNA, 122 bp, Homo sapiens
  misc_feature (61)..(62): /note="This region represents a CpG dinucleotide"
  misc_feature (61)..(61): /note="Nucleotide may be methylated to form 5-methylcytosine"
ttacacagtaggcttcttattcaagaaatcacaaaactcagggattaacagccaggatttcgcaactagtttttggggttcaaatctcagctctactggttactagctgtgaataagccctg

SEQ ID NO: 2002 - DNA, 122 bp, Homo sapiens
  misc_feature (61)..(62): /note="This region represents a CpG dinucleotide"
  misc_feature (61)..(61): /note="Nucleotide may be methylated to form 5-methylcytosine"
gtcccacggaaagagaccagacctggaaaagacagagtcaaagctgggtgagcaggccttcgaagggcgtggctcagcaaagataatccatattgtagtgcaagaggattcttgtggaatat

SEQ ID NO: 2003 - DNA, 122 bp, Homo sapiens
  misc_feature (61)..(62): /note="This region represents a CpG dinucleotide"
  misc_feature (61)..(61): /note="Nucleotide may be methylated to form 5-methylcytosine"
gtgacaaagcgagaccctgtctcaaaaataatactactactaattagccaggcatagtggcgcatacctgtagtcccagggagactgaggtgggagaatcacttgagcccaggaggttaagg

SEQ ID NO: 2004 - DNA, 122 bp, Homo sapiens
  misc_feature (61)..(62): /note="This region represents a CpG dinucleotide"
  misc_feature (61)..(61): /note="Nucleotide may be methylated to form 5-methylcytosine"
agaagagacaagggacattatggggtgaaggtcgggggttgtttgacatttgccccttcccgatgtaactaattaagcttcaagttgtaatgtgttttatgggctagaaggctttagtgcct

SEQ ID NO: 2005 - DNA, 122 bp, Homo sapiens
  misc_feature (61)..(62): /note="This region represents a CpG dinucleotide"
  misc_feature (61)..(61): /note="Nucleotide may be methylated to form 5-methylcytosine"
gctcctgaatgggtggaggttccaactgaaattgaagagagcacctgagtttttttccctcgatagataacctgaagcaataggaagaaaactgtctcagaagaggtatggggcaggaaaga

SEQ ID NO: 2006 - DNA, 122 bp, Homo sapiens
  misc_feature (61)..(62): /note="This region represents a CpG dinucleotide"
  misc_feature (61)..(61): /note="Nucleotide may be methylated to form 5-methylcytosine"
gttgcagtgagaggctgctttagggccctgaaaatctgaaaggatctcccagcatagtgtcgagaagaacaggaaagtgctgtttgcagagcaacttcactaagatgatgttccagatgaat

SEQ ID NO: 2007 - DNA, 122 bp, Homo sapiens
  misc_feature (61)..(62): /note="This region represents a CpG dinucleotide"
  misc_feature (61)..(61): /note="Nucleotide may be methylated to form 5-methylcytosine"
caggcttctgatgatgaggctactcttagtcatcagctgggaagcctcatggtttcattccgcactcaaatcaaagttaacatgcatgagtactggggagagcagatcctaagacaggatct

SEQ ID NO: 2008 - DNA, 122 bp, Homo sapiens
  misc_feature (61)..(62): /note="This region represents a CpG dinucleotide"
  misc_feature (61)..(61): /note="Nucleotide may be methylated to form 5-methylcytosine"
gctattacgctattaattatagcttagcagtacatcagtcaatcagtccatggcaccagccgttcagtagctgttgtactctggtcctgatggctcagggaatgccactttgtatatttctt

SEQ ID NO: 2009 - DNA, 122 bp, Homo sapiens
  misc_feature (61)..(62): /note="This region represents a CpG dinucleotide"
  misc_feature (61)..(61): /note="Nucleotide may be methylated to form 5-methylcytosine"
ataaaggcaaaactcacccttctggttctataatcctatccaaatggagtcttcatctaccgcatactatcctaactaatgctacaggattatcaggaatacagatataaagacactgcaag

SEQ ID NO: 2010 - DNA, 122 bp, Homo sapiens
  misc_feature (61)..(62): /note="This region represents a CpG dinucleotide"
  misc_feature (61)..(61): /note="Nucleotide may be methylated to form 5-methylcytosine"
tcccagaatcccctaggcctctgggtatccccaaaccacaggattcccaagaccgcattacggcttcacatgcaatgacttgtaggctggtaaatgccacgagactaagatggcgcgttaaa

SEQ ID NO: 2011 - DNA, 122 bp, Homo sapiens
  misc_feature (61)..(62): /note="This region represents a CpG dinucleotide"
  misc_feature (61)..(61): /note="Nucleotide may be methylated to form 5-methylcytosine"
gatggcttgtaacatgatttttaaagccatgtttgcgaccacatttaacacttgcaattacgaccacgcctggtatgtgagtttgagaacacattgccaaggagggctaaactgttctttat

SEQ ID NO: 2012 - DNA, 122 bp, Homo sapiens
  misc_feature (61)..(62): /note="This region represents a CpG dinucleotide"
  misc_feature (61)..(61): /note="Nucleotide may be methylated to form 5-methylcytosine"
atttgtttgcaagtcattgacagaagtgaagtttccaccaagattcagctgagaccttgccgctgcaggctaagatcctcaactctctagtgtggacgtcacatctggaatcttgtgtcttc

SEQ ID NO: 2013 - DNA, 122 bp, Homo sapiens
  misc_feature (61)..(62): /note="This region represents a CpG dinucleotide"
  misc_feature (61)..(61): /note="Nucleotide may be methylated to form 5-methylcytosine"
gagcaagtctatgggcgccattttgtcaacagcatgtactcacttggtgtctctgtttcacgttttgttaattcttgcaatgtttcatactttttcatcattattatatctgttttgatgat

SEQ ID NO: 2014 - DNA, 122 bp, Homo sapiens
  misc_feature (61)..(62): /note="This region represents a CpG dinucleotide"
  misc_feature (61)..(61): /note="Nucleotide may be methylated to form 5-methylcytosine"
ggttgcccaagaccaagtcttagaggcagccgggttccgatcaagtgctgcgaaacgacgcgtttgacagctgctctggagccgaggatcacaataagagaaggcgcgtgaggctccggcag

SEQ ID NO: 2015 - DNA, 122 bp, Homo sapiens
  misc_feature (61)..(62): /note="This region represents a CpG dinucleotide"
  misc_feature (61)..(61): /note="Nucleotide may be methylated to form 5-methylcytosine"
atatttataaaatacccacttggaactgatgagacaggtttcagaaatgtttgctgcatgcgctcattgtctgaatcattgtttcaggttgctccggttgctaagaagactatgaacaagtc

SEQ ID NO: 2016 - DNA, 122 bp, Homo sapiens
  misc_feature (61)..(62): /note="This region represents a CpG dinucleotide"
  misc_feature (61)..(61): /note="Nucleotide may be methylated to form 5-methylcytosine"
tgccgttgcgctccagcctgggcaacaagagtgaaactccgtctcgaaaaaaaagaactacgtaaaggcaaaaagttaaagtggtttataattaggttaccaatagtgtgtgtataaatgat

SEQ ID NO: 2017 - DNA, 122 bp, Homo sapiens
  misc_feature (61)..(62): /note="This region represents a CpG dinucleotide"
  misc_feature (61)..(61): /note="Nucleotide may be methylated to form 5-methylcytosine"
gagtagagactgactggaggtgggaagttacctcagtccttaaaacaagtgcctcctgggcggcagctcttagagatgacacggaagcatgaacaatggaagaaaccacagatcagtgagac

SEQ ID NO: 2018 - DNA, 122 bp, Homo sapiens
  misc_feature (61)..(62): /note="This region represents a CpG dinucleotide"
  misc_feature (61)..(61): /note="Nucleotide may be methylated to form 5-methylcytosine"
ggctccggagtcggacggcgacggtgcagatgagggcgcacaggggacggtcctggagcccgggaagggtgcgagatggagacggcggttcagaaaagttgtcaggtctccagcccgggcag

SEQ ID NO: 2019 - DNA, 122 bp, Homo sapiens
  misc_feature (61)..(62): /note="This region represents a CpG dinucleotide"
  misc_feature (61)..(61): /note="Nucleotide may be methylated to form 5-methylcytosine"
gtggtttccagttcccaacagaggtgtttcttatcattgaacattcaaggtggaacatatcggaagtggtgtggggagtgtactttttagaggattccactgatgaatccttcatggagtga

SEQ ID NO: 2020 - DNA, 122 bp, Homo sapiens
  misc_feature (61)..(62): /note="This region represents a CpG dinucleotide"
  misc_feature (61)..(61): /note="Nucleotide may be methylated to form 5-methylcytosine"
gctcatggatcaaaggagtgactttaactttcaagttcttactatttaagaaatacatttcgtaaggcttcagctgccatagataatgattcctcagatggatctgggcaaaatgaatggaa

SEQ ID NO: 2021 - DNA, 122 bp, Homo sapiens
  misc_feature (61)..(62): /note="This region represents a CpG dinucleotide"
  misc_feature (61)..(61): /note="Nucleotide may be methylated to form 5-methylcytosine"
ctgccgcccgctgcagttcgcctcgcaggaggtggtgccgtacgggcacttccgccgcctcgactacttctcagaagagaggagcgcccgggacctgctcaagcgcctggaggcgccgcggc

SEQ ID NO: 2022 - DNA, 122 bp, Homo sapiens
  misc_feature (61)..(62): /note="This region represents a CpG dinucleotide"
  misc_feature (61)..(61): /note="Nucleotide may be methylated to form 5-methylcytosine"
ggtactgcctcaatggtgaatgacagtcatttttctctctcccacttctaacacagccagcgtaagaaaccgtccttttccataatatccatatttttagcgtgtgaagactggctccaaaa

SEQ ID NO: 2023 - DNA, 122 bp, Homo sapiens
  misc_feature (61)..(62): /note="This region represents a CpG dinucleotide"
  misc_feature (61)..(61): /note="Nucleotide may be methylated to form 5-methylcytosine"
taaatttttgttgtgtggccccggaatctggggtagactctgtgactcacattactgtcacgtttccttgtctttcaagtgagaaagctagcagttaaagtgactcctagtagaagtccatc

SEQ ID NO: 2024 - DNA, 122 bp, Homo sapiens
  misc_feature (61)..(62): /note="This region represents a CpG dinucleotide"
  misc_feature (61)..(61): /note="Nucleotide may be methylated to form 5-methylcytosine"
acataggtgagggcagttaattcctaatctccaggttctccctgcttcatgggtacataccgcatttgtacctgtggccggcacctgccaaggttgccagggcgcaggggtaagaggtggaa

SEQ ID NO: 2025 - DNA, 122 bp, Homo sapiens
  misc_feature (61)..(62): /note="This region represents a CpG dinucleotide"
  misc_feature (61)..(61): /note="Nucleotide may be methylated to form 5-methylcytosine"
ctgagagcacgcgccagacacaggttggctcggcccgaagcgaatttgggactctcgtcgcggtgtcctattaattagcttttcccggcgcctcagggactccggggtgaagatggagaggt

SEQ ID NO: 2026 - DNA, 122 bp, Homo sapiens
  misc_feature (61)..(62): /note="This region represents a CpG dinucleotide"
  misc_feature (61)..(61): /note="Nucleotide may be methylated to form 5-methylcytosine"
ccaaactggagcgaagagcaccatgagaccactgggggttactggctcaatggcagcccacggatgacaatgcacaaacctcatttgtgtgtgttcacattttgacaaggaatagcaccaag

SEQ ID NO: 2027 - DNA, 122 bp, Homo sapiens
  misc_feature (61)..(62): /note="This region represents a CpG dinucleotide"
  misc_feature (61)..(61): /note="Nucleotide may be methylated to form 5-methylcytosine"
ctagctactctggtggggacttggagaacctttgtgtggacactctgtatctagctaatccggtggggttgtggagaacgtttgtttctagctcagggattgtaaatgcaccaatcagtgcc

SEQ ID NO: 2028 - DNA, 122 bp, Homo sapiens
  misc_feature (61)..(62): /note="This region represents a CpG dinucleotide"
  misc_feature (61)..(61): /note="Nucleotide may be methylated to form 5-methylcytosine"
agaccccatctctacaaaaaatttaaaaaaaaattagcgacgcacagtggtacacgcctgcggtcccagctactcagaaggttatggtgggaagattgcttaagcccaggagattaaggctg

SEQ ID NO: 2029 - DNA, 122 bp, Homo sapiens
  misc_feature (61)..(62): /note="This region represents a CpG dinucleotide"
  misc_feature (61)..(61): /note="Nucleotide may be methylated to form 5-methylcytosine"
tattaaatcacttggaaatatgtggcagttgcattttgaatgtccaaaaatctcttcaaacgtctaaaattaatacaaatgtgaagtagtaaagctagagtgaagtgaatgcctgatccatt

SEQ ID NO: 2030 - DNA, 122 bp, Homo sapiens
  misc_feature (61)..(62): /note="This region represents a CpG dinucleotide"
  misc_feature (61)..(61): /note="Nucleotide may be methylated to form 5-methylcytosine"
tctgatttgtcacaaatcaaacagcatctgggatctttctctgaaaactcctctcattatcgcaagaaattcctgcacataattcaatcctttaatttaacttggcatgacattcatataat

SEQ ID NO: 2031 - DNA, 122 bp, Homo sapiens
  misc_feature (61)..(62): /note="This region represents a CpG dinucleotide"
  misc_feature (61)..(61): /note="Nucleotide may be methylated to form 5-methylcytosine"
atgctttatatgctgatgtcagctagcacctagcacacacgggtagccattaaactggtgcgtttgctgaacggagttcattttcagaaacttttcaatgagacgttcctaaacagaagtgt

SEQ ID NO: 2032 - DNA, 122 bp, Homo sapiens
  misc_feature (61)..(62): /note="This region represents a CpG dinucleotide"
  misc_feature (61)..(61): /note="Nucleotide may be methylated to form 5-methylcytosine"
tcctacttccatcttcactctctcccccttgttaaagtagatccatatactctcatagcacgggttagtaggcaggggttttcaagtcaataaactggtatttgaaaccctgggcgccacca

SEQ ID NO: 2033 - DNA, 122 bp, Homo sapiens
  misc_feature (61)..(62): /note="This region represents a CpG dinucleotide"
  misc_feature (61)..(61): /note="Nucleotide may be methylated to form 5-methylcytosine"
ctgaacacaagaagccctgagtcttttgaagccgggcaccaaagttaaagattcacttcccgcattccccatggccccctcttgcagcttagctcggctctgagcccccgaaacgcccttcg

SEQ ID NO: 2034 - DNA, 122 bp, Homo sapiens
  misc_feature (61)..(62): /note="This region represents a CpG dinucleotide"
  misc_feature (61)..(61): /note="Nucleotide may be methylated to form 5-methylcytosine"
catgcactcctgtgtgctcagatggtggagtgggcagggcttgtcatatgacaaacccatcgctacctgtgaaaattactactatgcagatgttctccacccccaccctctgacagcctgca

SEQ ID NO: 2035 - DNA, 122 bp, Homo sapiens
  misc_feature (61)..(62): /note="This region represents a CpG dinucleotide"
  misc_feature (61)..(61): /note="Nucleotide may be methylated to form 5-methylcytosine"
actttgaaaagttcagaaaacactttttgctgttttcttcagagcttcaaaaatttgatgcggttcattacctataatttgaaaaaactgccctacatcataggatttttaatctgagggct

SEQ ID NO: 2036 - DNA, 122 bp, Homo sapiens
  misc_feature (61)..(62): /note="This region represents a CpG dinucleotide"
  misc_feature (61)..(61): /note="Nucleotide may be methylated to form 5-methylcytosine"
cttggcgatggagttgaagttagttttgctgccgaagagcccgtgcaaaaagacgacggccgggagggctgcctccccgtccagaagcctgtaggaaagcggaagcggcctggcaggggaag

SEQ ID NO: 2037 - DNA, 122 bp, Homo sapiens
  misc_feature (61)..(62): /note="This region represents a CpG dinucleotide"
  misc_feature (61)..(61): /note="Nucleotide may be methylated to form 5-methylcytosine"
caaaatttaatctatgtttaataaacaaaataaaaatatcactttaaaatgtcgatatcacgatagtgaagaggcaaaagcaacccaagagtccatccacagatgaatgagtaaataaaata

SEQ ID NO: 2038 - DNA, 122 bp, Homo sapiens
  misc_feature (61)..(62): /note="This region represents a CpG dinucleotide"
  misc_feature (61)..(61): /note="Nucleotide may be methylated to form 5-methylcytosine"
tcaggttaaattgtaatccctaatattggaggaggggcttggtgggaggtgattagatcacgggggcagacatctcccttgcagttctcatgatagtgacttctcacaagatatggttgttt

SEQ ID NO: 2039 - DNA, 122 bp, Homo sapiens
  misc_feature (61)..(62): /note="This region represents a CpG dinucleotide"
  misc_feature (61)..(61): /note="Nucleotide may be methylated to form 5-methylcytosine"
cagagaacagggaagatttttattgagcacgtactgtgggctcagcactatttatgcacacgtacatataaggctacaaaatcgaaaagccaaaaggagcatacgttttacaagctggagta

SEQ ID NO: 2040 - DNA, 122 bp, Homo sapiens
  misc_feature (61)..(62): /note="This region represents a CpG dinucleotide"
  misc_feature (61)..(61): /note="Nucleotide may be methylated to form 5-methylcytosine"
ataaaagagatctgggcaggcttttcctcatactgaataattgaaccaaattggctaggacgggaacagattagtggaagaagcactagaatagggataggagacttgtattctgtcactaa

SEQ ID NO: 2041 - DNA, 122 bp, Homo sapiens
  misc_feature (61)..(62): /note="This region represents a CpG dinucleotide"
  misc_feature (61)..(61): /note="Nucleotide may be methylated to form 5-methylcytosine"
gttctttttattattgttattattacatctctgatagggagtccagttttcttgattttgcgatagccaataataattgagggagttttataatgattcagcatgggaaaatcagagttaag

SEQ ID NO: 2042 - DNA, 122 bp, Homo sapiens
  misc_feature (61)..(62): /note="This region represents a CpG dinucleotide"
  misc_feature (61)..(61): /note="Nucleotide may be methylated to form 5-methylcytosine"
ctcaaatgatctgcctgccttggcctcccaaagtgctgggattacaggcgtgagccaccacgcccggtgctgatggcatttggaaccaccctgtagttacatacacaagtgtttctgatccc

SEQ ID NO: 2043 - DNA, 122 bp, Homo sapiens
  misc_feature (61)..(62): /note="This region represents a CpG dinucleotide"
  misc_feature (61)..(61): /note="Nucleotide may be methylated to form 5-methylcytosine"
cctcaaattctaggtggaagtcatgagcgaaagagatcatgaacgcttcaaatatggctacggagttataagcgtcatcaccaactcactgaagattaaggaatctgggaacaaattagcct

SEQ ID NO: 2044 - DNA, 122 bp, Homo sapiens
  misc_feature (61)..(62): /note="This region represents a CpG dinucleotide"
  misc_feature (61)..(61): /note="Nucleotide may be methylated to form 5-methylcytosine"
gacaatgactgaaactattactactcagtctctgcttcttccggaacagctgagcaaaagcgttctgacattgagtcttttaagcctagatcggcattatttcgtctaactgatcaagaagt

SEQ ID NO: 2045 - DNA, 122 bp, Homo sapiens
  misc_feature (61)..(62): /note="This region represents a CpG dinucleotide"
  misc_feature (61)..(61): /note="Nucleotide may be methylated to form 5-methylcytosine"
ctcctccgggcggtgtgttgggagggcccaggtcaaggcgcgcgtgggcggaagcggcggcggcggcgaaggcggcggctgtcagagctggagggccgggcaccgcggccatggagggtcaa

SEQ ID NO: 2046 - DNA, 122 bp, Homo sapiens
  misc_feature (61)..(62): /note="This region represents a CpG dinucleotide"
  misc_feature (61)..(61): /note="Nucleotide may be methylated to form 5-methylcytosine"
tgaggcgtggcgcagctgggagcaaagcacaggtgggctgggcgcggtttggggttcgggcgtggcagagtggcggcggggtctggggaagagttgtcttgggggcagcgccagccaccaga

SEQ ID NO: 2047 - DNA, 122 bp, Homo sapiens
  misc_feature (61)..(62): /note="This region represents a CpG dinucleotide"
  misc_feature (61)..(61): /note="Nucleotide may be methylated to form 5-methylcytosine"
gctggaaatccgccatcatgggagtattagcaccaaagaaatcaacaaacattacaaatccgggcttgatttattgttttgtggattgtctagacttaagaatgtgacagagaagtgttagt

SEQ ID NO: 2048 - DNA, 122 bp, Homo sapiens
  misc_feature (61)..(62): /note="This region represents a CpG dinucleotide"
  misc_feature (61)..(61): /note="Nucleotide may be methylated to form 5-methylcytosine"
tcaaatccaatgcacaaaatccatgcacctagaaggtaaaatgtgccttccagaggaaaacgctgggatgctgtttgattccaccccagagatatcacattgctaataaaaagactaacctc

SEQ ID NO: 2049 - DNA, 122 bp, Homo sapiens
  misc_feature (61)..(62): /note="This region represents a CpG dinucleotide"
  misc_feature (61)..(61): /note="Nucleotide may be methylated to form 5-methylcytosine"
gtggggttaaggctgagaaaatctggtcagataacagcacctccaggcttccgggagacccgccttggcaagactgagctgccagcagaagcctatgagggaccacaggtgtgtgaagtgtg

SEQ ID NO: 2050 - DNA, 122 bp, Homo sapiens
  misc_feature (61)..(62): /note="This region represents a CpG dinucleotide"
  misc_feature (61)..(61): /note="Nucleotide may be methylated to form 5-methylcytosine"
aagctggttaagagcataggctctagaaacagatggcctggtttagaatcccagctctgccgttttcaaaccgtaacttcaggtaagttatttaaccactatgtgattcaactatagcaact

SEQ ID NO: 2051 - DNA, 122 bp, Homo sapiens
  misc_feature (61)..(62): /note="This region represents a CpG dinucleotide"
  misc_feature (61)..(61): /note="Nucleotide may be methylated to form 5-methylcytosine"
cgccgggcccggctcccccggcgccgcagcgcggggctccagccactgccggccggttggcggccgccgctccggctctgcccgcgctccccgcatccctccgccgcccccggggccgctcc

SEQ ID NO: 2052 - DNA, 122 bp, Homo sapiens
  misc_feature (61)..(62): /note="This region represents a CpG dinucleotide"
  misc_feature (61)..(61): /note="Nucleotide may be methylated to form 5-methylcytosine"
cagatattgcggacagtctaattcgccccgcgacgtgagggagaacccaggagcgggctccggtagagaaagaagcttccggtcaacgaccacatccacctgaatcatgagcaggttttaag

SEQ ID NO: 2053 - DNA, 122 bp, Homo sapiens
  misc_feature (61)..(62): /note="This region represents a CpG dinucleotide"
  misc_feature (61)..(61): /note="Nucleotide may be methylated to form 5-methylcytosine"
aacagaggacttctcggggttcccgaattcccagggttaaaacaaacttggtttgtgcggcgacaccgctacccttaccggtccccagatagtcgcggatccccgaagctaagagccagggc

SEQ ID NO: 2054 - DNA, 122 bp, Homo sapiens
  misc_feature (61)..(62): /note="This region represents a CpG dinucleotide"
  misc_feature (61)..(61): /note="Nucleotide may be methylated to form 5-methylcytosine"
agcagccttttggaaaacaatccggcaagagccaggaaaatggcagctgcaggccaggtgcggtggcagtggctcatgcctgtaatcccagcactctgggaggccgagatgggtggatcacc

SEQ ID NO: 2055 - DNA, 122 bp, Homo sapiens
  misc_feature (61)..(62): /note="This region represents a CpG dinucleotide"
  misc_feature (61)..(61): /note="Nucleotide may be methylated to form 5-methylcytosine"
tccccacagccacctgtcttagggaagcacagaaggcaagacattgctgccaacaaactccgcttccctgactctgcagagggatgcaccgcaccctgccagcctggcttcctttctgagca

SEQ ID NO: 2056 - DNA, 122 bp, Homo sapiens
  misc_feature (61)..(62): /note="This region represents a CpG dinucleotide"
  misc_feature (61)..(61): /note="Nucleotide may be methylated to form 5-methylcytosine"
gtccaaaaagacaggtgttaaccggtggagctgggtctaaatccacaattttctcagtgccgctacaatggtagcagaattaagcaggattttctagtccttacaaataggttcaaggcagc

SEQ ID NO: 2057 - DNA, 122 bp, Homo sapiens
  misc_feature (61)..(62): /note="This region represents a CpG dinucleotide"
  misc_feature (61)..(61): /note="Nucleotide may be methylated to form 5-methylcytosine"
aggtgcagaaattgcacacagtatgccatcttttgtactggggaaaggaatacaaagcagcggggaaaggaatgtgtatgcatgtatatgtaaatacagtcattaaaactgaaaacaaagtg

SEQ ID NO: 2058 - DNA, 122 bp, Homo sapiens
  misc_feature (61)..(62): /note="This region represents a CpG dinucleotide"
  misc_feature (61)..(61): /note="Nucleotide may be methylated to form 5-methylcytosine"
gagtctgtctctactgagaacgcagcgcgtcagggccgagctcttcactggcctgctccgcgctcttcaatgccagcgccaggcgctcaccctgcagagcgtcccgcctctcaaagaggggt

SEQ ID NO: 2059 - DNA, 122 bp, Homo sapiens
  misc_feature (61)..(62): /note="This region represents a CpG dinucleotide"
  misc_feature (61)..(61): /note="Nucleotide may be methylated to form 5-methylcytosine"
gatctgcccgcctcggccttccaaagtgctgggattacaggcatgagccactgtgcccagcgggtctctgcagtttatccagtaaagcaaatcattttaagacttgggctgaaatgacctca

SEQ ID NO: 2060 - DNA, 122 bp, Homo sapiens
  misc_feature (61)..(62): /note="This region represents a CpG dinucleotide"
  misc_feature (61)..(61): /note="Nucleotide may be methylated to form 5-methylcytosine"
tttttcagagatggaggcagaggttgaatgattcatacagagtctcacagctgatgacagcgccagtagtagaagctgctctgactctcaatcttgtctcctctagtgccacatgcttgttg

SEQ ID NO: 2061 - DNA, 122 bp, Homo sapiens
  misc_feature (61)..(62): /note="This region represents a CpG dinucleotide"
  misc_feature (61)..(61): /note="Nucleotide may be methylated to form 5-methylcytosine"
tctgccctgacggttgagtctctgcccagacagcattcaccacacactgacttgagaggccgtgggccttaaggaaacatccgtggaagtctggcagtactccctgtggcctgtggtgatgg

SEQ ID NO: 2062 - DNA, 122 bp, Homo sapiens
  misc_feature (61)..(62): /note="This region represents a CpG dinucleotide"
  misc_feature (61)..(61): /note="Nucleotide may be methylated to form 5-methylcytosine"
attctgatgcctgctcaagtttagagctgctgggcggtaagcctgggacacggcagttctcgttagtgtgtaatgagagtgatgagggaatcaattagccaattactctaccttggaaaaga

SEQ ID NO: 2063 - DNA, 122 bp, Homo sapiens
  misc_feature (61)..(62): /note="This region represents a CpG dinucleotide"
  misc_feature (61)..(61): /note="Nucleotide may be methylated to form 5-methylcytosine"
tcatggcaaacacaccacttttagatctatcctttcacgatatgaagtgtatttcatccacgttggcttaattccatccaattcccatgaagtacatgttcattttcagctgcatttgctca

SEQ ID NO: 2064 - DNA, 122 bp, Homo sapiens
  misc_feature (61)..(62): /note="This region represents a CpG dinucleotide"
  misc_feature (61)..(61): /note="Nucleotide may be methylated to form 5-methylcytosine"
cccgctcgcctataaggagctgtccgccacccgggtgctgattccagctctcgcgcccgacgaggtggatttggctgtccaccgagctccggcgcctgtcgttctaattgggtttggatttg

SEQ ID NO: 2065 - DNA, 122 bp, Homo sapiens
  misc_feature (61)..(62): /note="This region represents a CpG dinucleotide"
  misc_feature (61)..(61): /note="Nucleotide may be methylated to form 5-methylcytosine"
gaggaacctaaggctcagagtggggctgggacttgcccaaggtcacacagccaggggattcgaagctagatctgtcttacttgagcaagggtcttcttaatcaccacatggtggttatcaac

SEQ ID NO: 2066 - DNA, 122 bp, Homo sapiens
  misc_feature (61)..(62): /note="This region represents a CpG dinucleotide"
  misc_feature (61)..(61): /note="Nucleotide may be methylated to form 5-methylcytosine"
ccattactgggtatacacccaaaggaatataaaccattctatcacaaagacacatgcatgcgtaagttcattgtagcactattcacaatagcaaagggtggaatcaacctaaatgcccatca

SEQ ID NO: 2067 - DNA, 122 bp, Homo sapiens
  misc_feature (61)..(62): /note="This region represents a CpG dinucleotide"
  misc_feature (61)..(61): /note="Nucleotide may be methylated to form 5-methylcytosine"
cggtatctcttctacccagtctctctacctgactcttccattctctgttgctgcctttgacggttcatgtgactatgtgggggcacacccagataatccaggatcatcctcattttaaagcc

SEQ ID NO: 2068 - DNA, 122 bp, Homo sapiens
  misc_feature (61)..(62): /note="This region represents a CpG dinucleotide"
  misc_feature (61)..(61): /note="Nucleotide may be methylated to form 5-methylcytosine"
aggacagggtagggtctgcaggagcctaggaccaggcggaggacgcggtctgcggcgctgcgctccagggccgacgacggagaggctgggaggcgctcaggacgggaatccacctcgcaggt

SEQ ID NO: 2069 - DNA, 122 bp, Homo sapiens
  misc_feature (61)..(62): /note="This region represents a CpG dinucleotide"
  misc_feature (61)..(61): /note="Nucleotide may be methylated to form 5-methylcytosine"
gtgctttttttattgactgcagacagatgatcagttcctatgtttatcgcattaggacaccgttcttagcatagtttcatactcatggcacagagccaaccagcacaatttctataacatat

SEQ ID NO: 2070 - DNA, 122 bp, Homo sapiens
  misc_feature (61)..(62): /note="This region represents a CpG dinucleotide"
  misc_feature (61)..(61): /note="Nucleotide may be methylated to form 5-methylcytosine"
aggagttaccttggtgatcaacgtaaggcttgaaggcctggaggatttttggcacagccacgcccatgtcaagttccgtcagagtgagctcattcataaagtaggggagctagaggaaacaa

SEQ ID NO: 2071 - DNA, 122 bp, Homo sapiens
  misc_feature (61)..(62): /note="This region represents a CpG dinucleotide"
  misc_feature (61)..(61): /note="Nucleotide may be methylated to form 5-methylcytosine"
taaacacacacacatataggcaaacacacacacattctccatacacacacacacacactacgcacagcccccactgggctgagtttagctgaaatgctaggtcctgaacttagaataacagc

SEQ ID NO: 2072 - DNA, 122 bp, Homo sapiens
  misc_feature (61)..(62): /note="This region represents a CpG dinucleotide"
  misc_feature (61)..(61): /note="Nucleotide may be methylated to form 5-methylcytosine"
agctggtggaaagaaagcaattaatatacgaaaaatttcaaaagtgcttcagagagctgacgagagcccaagtcagttttataaaaaactttgtgaagcattccggccttacaccctatttg

SEQ ID NO: 2073 - DNA, 122 bp, Homo sapiens
  misc_feature (61)..(62): /note="This region represents a CpG dinucleotide"
  misc_feature (61)..(61): /note="Nucleotide may be methylated to form 5-methylcytosine"
gtagacgtgatgtcaagaactctgaattagaatgccttgcctttgtccttgtcacatctccgtgacctcatctgcctagtttagtgcctacattgcaggttcatttgaaactcacctcttct

SEQ ID NO: 2074 - DNA, 122 bp, Homo sapiens
  misc_feature (61)..(62): /note="This region represents a CpG dinucleotide"
  misc_feature (61)..(61): /note="Nucleotide may be methylated to form 5-methylcytosine"
ccaccccagtgtgcaggccggttggagtttttctggggatccgctcccacctggctgtctcgcatgctttttttctttttcctttttttttttagtgaaagttcatactctggctaaatgta

SEQ ID NO: 2075 - DNA, 122 bp, Homo sapiens
  misc_feature (61)..(62): /note="This region represents a CpG dinucleotide"
  misc_feature (61)..(61): /note="Nucleotide may be methylated to form 5-methylcytosine"
aattaaatgaaggatgattcaactggaattctgatattcagttgacctgatgactaacaacgttattcatttaagaaagtcttaaattctttaaaacaaggaatattaaactgactatcctt

SEQ ID NO: 2076 - DNA, 122 bp, Homo sapiens
  misc_feature (61)..(62): /note="This region represents a CpG dinucleotide"
  misc_feature (61)..(61): /note="Nucleotide may be methylated to form 5-methylcytosine"
catatctctgtttctccaggattggtccttggtgccttatttagttcatttggatggtttcgatgcttgtggatattcactggtctctgggtattgatgagttatgtatttattgtagtctt

SEQ ID NO: 2077 - DNA, 122 bp, Homo sapiens
  misc_feature (61)..(62): /note="This region represents a CpG dinucleotide"
  misc_feature (61)..(61): /note="Nucleotide may be methylated to form 5-methylcytosine"
aaaaccttactatgtaacactgctatagaaatctataaagtgtttccttcgtaggagggccgtaggcagccatggcgcccagcaggaatggcatgatgttgaagccccacttccacaaggac

SEQ ID NO: 2078 - DNA, 122 bp, Homo sapiens
  misc_feature (61)..(62): /note="This region represents a CpG dinucleotide"
  misc_feature (61)..(61): /note="Nucleotide may be methylated to form 5-methylcytosine"
gacaactcatggcggtggcggcagcagctgcttgggcatggtgcagtggtgactgagctacgagcctggcggcgggtgttcgccgagctccggtccccgcgtgtctcccagaaggcggtgaa

SEQ ID NO: 2079 - DNA, 122 bp, Homo sapiens
  misc_feature (61)..(62): /note="This region represents a CpG dinucleotide"
  misc_feature (61)..(61): /note="Nucleotide may be methylated to form 5-methylcytosine"
ctgtgagggtccttgtgagataatccgtgtaaagtgcccagcgagatgtctcactcagcccgtgctcagacgtgtttgcagagtgttaatctctcagaaggagctgattatcaacattcttt

SEQ ID NO: 2080 - DNA, 122 bp, Homo sapiens
  misc_feature (61)..(62): /note="This region represents a CpG dinucleotide"
  misc_feature (61)..(61): /note="Nucleotide may be methylated to form 5-methylcytosine"
gccgggagggccggcgccctcttccgaatgtcctgcggccccagcctctcctcacgctcgcgcagtctccgccgcagtctcagctgcagctgcaggactgagccgtgcacccggaggagacc

SEQ ID NO: 2081 - DNA, 122 bp, Homo sapiens
  misc_feature (61)..(62): /note="This region represents a CpG dinucleotide"
  misc_feature (61)..(61): /note="Nucleotide may be methylated to form 5-methylcytosine"
tttttttaatgtggctatccaattcaattaaaaatcttgtctttttcattgctactctgccgcgttacctctgttatatataaataggcaaccacggccgggcgtggtggctcacacctgta

SEQ ID NO: 2082 - DNA, 122 bp, Homo sapiens
  misc_feature (61)..(62): /note="This region represents a CpG dinucleotide"
  misc_feature (61)..(61): /note="Nucleotide may be methylated to form 5-methylcytosine"
ccaagatcaaggtgctggcaggttccatgtctagcgagggcttgattcctagtttatagacggctgtcttctcactgagtcatcacatagcagaagaagcaaggaagctctctggggtttct

SEQ ID NO: 2083 - DNA, 122 bp, Homo sapiens
  misc_feature (61)..(62): /note="This region represents a CpG dinucleotide"
  misc_feature (61)..(61): /note="Nucleotide may be methylated to form 5-methylcytosine"
cacagggttaactgtgagttaggctctgtgctgggcactaggggccaccaaggactccagcgtggcttctgttactgaggtgctttcagcctcatgggagagacagacaggcacatgagggc

SEQ ID NO: 2084 - DNA, 122 bp, Homo sapiens
  misc_feature (61)..(62): /note="This region represents a CpG dinucleotide"
  misc_feature (61)..(61): /note="Nucleotide may be methylated to form 5-methylcytosine"
gaaaacagtaaatgggaattctttggtagtgcagagtctgagtctgttccctctgcccagcgtctctgtttagaacatactgcaggagtgtccactgtaccaagaagggtagaaagggtcaa

SEQ ID NO: 2085 - DNA, 122 bp, Homo sapiens
  misc_feature (61)..(62): /note="This region represents a CpG dinucleotide"
  misc_feature (61)..(61): /note="Nucleotide may be methylated to form 5-methylcytosine"
tgctgaggcttaagtaggtaaacaaagctgccagggaagctcaaactgggtggagcccaccgcagctcagcaaggcctacaacctctatggactccacctctgtgggcagggcatagctgaa

SEQ ID NO: 2086 - DNA, 122 bp, Homo sapiens
  misc_feature (61)..(62): /note="This region represents a CpG dinucleotide"
  misc_feature (61)..(61): /note="Nucleotide may be methylated to form 5-methylcytosine"
cacacgctgcagagccatgctatgaagcgtcatctcccgctcagcagggctgctcaaccgcgacactactgacattccaggctgaacaattctttgttgtggggctgccctgtgcttctaag

SEQ ID NO: 2087 - DNA, 122 bp, Homo sapiens
  misc_feature (61)..(62): /note="This region represents a CpG dinucleotide"
  misc_feature (61)..(61): /note="Nucleotide may be methylated to form 5-methylcytosine"
cttctcacacctatgacctcacttcagcccctcatatgaacaacagtgcacagccctatgcgcacagccaaggcagcacctgtgtagcgtcattttccaggctgatgtctggaattcccctt

SEQ ID NO: 2088 - DNA, 122 bp, Homo sapiens
  misc_feature (61)..(62): /note="This region represents a CpG dinucleotide"
  misc_feature (61)..(61): /note="Nucleotide may be methylated to form 5-methylcytosine"
ttggacgtcccgtcaaccctgtggtcaccactcttctctctggacctgtgagtcagaaagcgctgctgtggtttcctgtgttttgttgcactgccagctctgtgtctcacctgacccacaca

SEQ ID NO: 2089 - DNA, 122 bp, Homo sapiens
  misc_feature (61)..(62): /note="This region represents a CpG dinucleotide"
  misc_feature (61)..(61): /note="Nucleotide may be methylated to form 5-methylcytosine"
ctccaaccaagaaagatgcgagcaagaggctgtggtgctcatttcagaaatctgttatcacggaaaagggaatcagaaaggtagtcctgaaaatgactacaagaagatcaactgtcctagtg

SEQ ID NO: 2090 - DNA, 122 bp, Homo sapiens
  misc_feature (61)..(62): /note="This region represents a CpG dinucleotide"
  misc_feature (61)..(61): /note="Nucleotide may be methylated to form 5-methylcytosine"
tttacagcagggctcctcaacctcagcgctgctgacattttgagtcgaatacttctgttgcgggggctgccctgtgtaccacaggatgtaagcatctctggccacaaccaccagatgattgt

SEQ ID NO: 2091 - DNA, 122 bp, Homo sapiens
  misc_feature (61)..(62): /note="This region represents a CpG dinucleotide"
  misc_feature (61)..(61): /note="Nucleotide may be methylated to form 5-methylcytosine"
caatcttataaataatctagaacacagaaccgctgcgcaaacaggagagttgatttactgcgcacaataaacagaacaggaaggaccagtgtggcagagtgaaccccaagtcctagacccat

SEQ ID NO: 2092 - DNA, 122 bp, Homo sapiens
  misc_feature (61)..(62): /note="This region represents a CpG dinucleotide"
  misc_feature (61)..(61): /note="Nucleotide may be methylated to form 5-methylcytosine"
cagtccagataagaagttctcttccccgaataaatcagtcgggggctggttgaagctgcacgttctgattcaccaagcttgagattcttcttttctaacaagttcttgggttatgctgatgc

SEQ ID NO: 2093 - DNA, 122 bp, Homo sapiens
  misc_feature (61)..(62): /note="This region represents a CpG dinucleotide"
  misc_feature (61)..(61): /note="Nucleotide may be methylated to form 5-methylcytosine"
aagaaagaagaaaggctgggcactgtggctcatgcctataattgcggtgctttcggaggccgaggcaggatgaggtgtgcagattgcttgagcctaggagttcaggccagctgggcaacatg

SEQ ID NO: 2094 - DNA, 122 bp, Homo sapiens
  misc_feature (61)..(62): /note="This region represents a CpG dinucleotide"
  misc_feature (61)..(61): /note="Nucleotide may be methylated to form 5-methylcytosine"
aatttgaatgagagcagacttctcataagaaactgcggagaaagtggaatacattactggcgggaaagcaaatggttcagatgctgagaaaaacagttttactatatgacctcacaattcca

SEQ ID NO: 2095 - DNA, 122 bp, Homo sapiens
  misc_feature (61)..(62): /note="This region represents a CpG dinucleotide"
  misc_feature (61)..(61): /note="Nucleotide may be methylated to form 5-methylcytosine"
gcgtgctgagcctccccgccgctttggagacggggctagattttcgttgcctccggctctcgacaggtgcaaaacaatgaattccaagcctcggaagcaaagaagcttaggatccgacggtg

SEQ ID NO: 2096 - DNA, 122 bp, Homo sapiens
  misc_feature (61)..(62): /note="This region represents a CpG dinucleotide"
  misc_feature (61)..(61): /note="Nucleotide may be methylated to form 5-methylcytosine"
aagacaagaaaagcatgaaaggactcatgaaatcataccaattaatgtgaataataactacgagcacagacacacaagccacctgggacatgcagtactcccaagtaatgccaggggcccca

SEQ ID NO: 2097 - DNA, 122 bp, Homo sapiens
  misc_feature (61)..(62): /note="This region represents a CpG dinucleotide"
  misc_feature (61)..(61): /note="Nucleotide may be methylated to form 5-methylcytosine"
tccatttttgtaaacgtgcctacttgctaaaatttatttgtaaccccaaaatcaaacacacgtagcaccttcgtggtcattcacagacacaggcagagcagcgaaggctttttgtagtattt

SEQ ID NO: 2098 - DNA, 122 bp, Homo sapiens
  misc_feature (61)..(62): /note="This region represents a CpG dinucleotide"
  misc_feature (61)..(61): /note="Nucleotide may be methylated to form 5-methylcytosine"
gaaagtttcaatactagaaatattgattaggcagaataaagaattatagaactagaaaatcggtcaattgaaatgatcaagtatgaagaacagaaagaaaaaaaataaagaaaaatgaacac

SEQ ID NO: 2099 - DNA, 122 bp, Homo sapiens
  misc_feature (61)..(62): /note="This region represents a CpG dinucleotide"
  misc_feature (61)..(61): /note="Nucleotide may be methylated to form 5-methylcytosine"
accacacccagcctgcaacttgttattctgagtcaacattatttccgaaatcctctatatcgtatgatacatgtagatccagttgattcatgctcgttgattattagattccattatatgac

SEQ ID NO: 2100 - DNA, 122 bp, Homo sapiens
  misc_feature (61)..(62): /note="This region represents a CpG dinucleotide"
  misc_feature (61)..(61): /note="Nucleotide may be methylated to form 5-methylcytosine"
tactgtaactaccatttttaatgacatctatgggccaggcatagtctttggcacttcactcgtatgatgatcttattgactccttacaacacaaatgctataaggtgagtaatcccttatag

SEQ ID NO: 2101 - DNA, 122 bp, Homo sapiens
  misc_feature (61)..(62): /note="This region represents a CpG dinucleotide"
  misc_feature (61)..(61): /note="Nucleotide may be methylated to form 5-methylcytosine"
tgctccatgccttctttccatagtatgctaaatttctgattttacacacatacacacacacgcagaggagaaaatgtaagctacctaacataaaacaaatgtcttcatatagaaaatgtttt

SEQ ID NO: 2102 - DNA, 122 bp, Homo sapiens
  misc_feature (61)..(62): /note="This region represents a CpG dinucleotide"
  misc_feature (61)..(61): /note="Nucleotide may be methylated to form 5-methylcytosine"
ggaaggatcacttgaggctgggaggtcaaggctgccgtgggtcatgatcacaccactgggcgtgatcctgggtgacagagagagaccctgtctcaaggagacaaaaaaaaaaagtagttact

SEQ ID NO: 2103 - DNA, 122 bp, Homo sapiens
  misc_feature (61)..(62): /note="This region represents a CpG dinucleotide"
  misc_feature (61)..(61): /note="Nucleotide may be methylated to form 5-methylcytosine"
ttatagaaaacaaggttcaattggctcacggttctgcaggctgtacaggtcgcatagcaccggcaacagcttctggggaggcttccgggggcttccaatcatggcggaaggcgaaggggagc

SEQ ID NO: 2104 - DNA, 122 bp, Homo sapiens
  misc_feature (61)..(62): /note="This region represents a CpG dinucleotide"
  misc_feature (61)..(61): /note="Nucleotide may be methylated to form 5-methylcytosine"
ggtgaagagtaccacattattaccaatgcccaggacagatgccaagctgggcagtgatggcgtgcagaaaagcctcaggggaaagacacagcagaaggggagagggagcatttctgtctttg

SEQ ID NO: 2105 - DNA, 122 bp, Homo sapiens
  misc_feature (61)..(62): /note="This region represents a CpG dinucleotide"
  misc_feature (61)..(61): /note="Nucleotide may be methylated to form 5-methylcytosine"
acgtggaaatctgacttctaaactcaatttaagagatgattggctgggcctggtggctcacgcttgtaatcccagcactttaggaggccgaggcgggcggatcacctgaggtcgggagttca

SEQ ID NO: 2106 - DNA, 122 bp, Homo sapiens
  misc_feature (61)..(62): /note="This region represents a CpG dinucleotide"
  misc_feature (61)..(61): /note="Nucleotide may be methylated to form 5-methylcytosine"
tcacaatgaatgagaaatggattctgcccacaagtaacttagcctggggtggggacatggcgcacctaattagctgggttgaggctgacatttctgttaggaacttgaagtacaggtatttt

SEQ ID NO: 2107 - DNA, 122 bp, Homo sapiens
  misc_feature (61)..(62): /note="This region represents a CpG dinucleotide"
  misc_feature (61)..(61): /note="Nucleotide may be methylated to form 5-methylcytosine"
ctcgtatcaaccaaccatgtgaggctgcccccccatgataagaggccactgaccacggagcggttctggccagtctacaaagaatgtgcagtaggggtttctgtgctctctgcttcatcttt

SEQ ID NO: 2108 - DNA, 122 bp, Homo sapiens
  misc_feature (61)..(62): /note="This region represents a CpG dinucleotide"
  misc_feature (61)..(61): /note="Nucleotide may be methylated to form 5-methylcytosine"
ctgacagagagctttcttctttcacttattaagctttcgctctaagctcacttttgtgtccgcgctccttaatcgtcttggaggtaggacaaagaggcgttatctcagacagacaatgacgg

SEQ ID NO: 2109 - DNA, 122 bp, Homo sapiens
  misc_feature (61)..(62): /note="This region represents a CpG dinucleotide"
  misc_feature (61)..(61): /note="Nucleotide may be methylated to form 5-methylcytosine"
tttctctaaagctacacacactctttggtctcagctgcagaagccaaatgacaaagagaacgtcatcgtctggaaagcatcgcaataagatgcacacgatgtgccaccgctgtggctctgaa

SEQ ID NO: 2110 - DNA, 122 bp, Homo sapiens
  misc_feature (61)..(62): /note="This region represents a CpG dinucleotide"
  misc_feature (61)..(61): /note="Nucleotide may be methylated to form 5-methylcytosine"
atttcgatgcatgtttcatactaactccccctcagtttgcacatgggacccatgaggtgacgtgaagagataactgcacatacctgggaacttctcagacctcctcgttttctttttcttta

SEQ ID NO: 2111 - DNA, 122 bp, Homo sapiens
  misc_feature (61)..(62): /note="This region represents a CpG dinucleotide"
  misc_feature (61)..(61): /note="Nucleotide may be methylated to form 5-methylcytosine"
tccaggataatcttccatctcaagatccttaacttaattatatctgtgaaatccctttgccgtgtaagaggacagatgcacaggttccagggactaggacgtggacctctttggggccgtta

SEQ ID NO: 2112 - DNA, 122 bp, Homo sapiens
  misc_feature (61)..(62): /note="This region represents a CpG dinucleotide"
  misc_feature (61)..(61): /note="Nucleotide may be methylated to form 5-methylcytosine"
gggcatagtcactcgtgttcttttctggaccagcacctcatgagttcaccttgctaccatcgaggaaatccagaacaactactcaaggacatgtctgaatgagtcactgaaccatggctctg

SEQ ID NO: 2113 - DNA, 122 bp, Homo sapiens
  misc_feature (61)..(62): /note="This region represents a CpG dinucleotide"
  misc_feature (61)..(61): /note="Nucleotide may be methylated to form 5-methylcytosine"
ggcgctttccctctgcttctccaattcccttacgcgagaggaacacaagccccacgttagcgcggcgctgcccagcttccagccaacacagcccctcccgtgctggacccgagcccagcaaa

SEQ ID NO: 2114 - DNA, 122 bp, Homo sapiens
  misc_feature (61)..(62): /note="This region represents a CpG dinucleotide"
  misc_feature (61)..(61): /note="Nucleotide may be methylated to form 5-methylcytosine"
atccaagcctgtaggaccttaggtttattctggccagtattacctgctaaaaaagacctacgcttttggtttccctttggtcacttatttttataacacatgcagacgtattttggggaggt

SEQ ID NO: 2115 - DNA, 122 bp, Homo sapiens
  misc_feature (61)..(62): /note="This region represents a CpG dinucleotide"
  misc_feature (61)..(61): /note="Nucleotide may be methylated to form 5-methylcytosine"
ctcaagtgatccacccgccgcggcctcccaaagtactgggattacaggcttgagccaccacgcccggctgattcatttgtatatatttctagaacagagcttggtacgaagttgagcattca

SEQ ID NO: 2116 - DNA, 122 bp, Homo sapiens
  misc_feature (61)..(62): /note="This region represents a CpG dinucleotide"
  misc_feature (61)..(61): /note="Nucleotide may be methylated to form 5-methylcytosine"
cagaaggaagtcatttttctttgcattgttcatcccagtcactggcatggccggatcagccgtggtcatgacctgatcatcctatgaggctccttgactgcacttcacccacctgctgctgg

SEQ ID NO: 2117 - DNA, 122 bp, Homo sapiens
  misc_feature (61)..(62): /note="This region represents a CpG dinucleotide"
  misc_feature (61)..(61): /note="Nucleotide may be methylated to form 5-methylcytosine"
gagccagacccatgttggccgtagctggaagagtgcccagaaccggacccatgtcggccgcgactaggagactggccagatccagccccatgtcggccatagccagaagactgactggagcc

SEQ ID NO: 2118 - DNA, 122 bp, Homo sapiens
  misc_feature (61)..(62): /note="This region represents a CpG dinucleotide"
  misc_feature (61)..(61): /note="Nucleotide may be methylated to form 5-methylcytosine"
cagccttggccaggggagacccgcccagagagttgttgggcgagaggagtaaccgggacccgagggtttggtgcctggagaagggagtttgggctggtaggctttgtctcagtaaggtggag

SEQ ID NO: 2119 - DNA, 122 bp, Homo sapiens
  misc_feature (61)..(62): /note="This region represents a CpG dinucleotide"
  misc_feature (61)..(61): /note="Nucleotide may be methylated to form 5-methylcytosine"
ccacagagtcagatcacggcttcacaccagtcgttctggtcacttaggcgttcgcgtgagcgctcaaccccttaccgccacctcatcgtcactctacaccattctgagcgcaaaaatgtttt

SEQ ID NO: 2120 - DNA, 122 bp, Homo sapiens
  misc_feature (61)..(62): /note="This region represents a CpG dinucleotide"
  misc_feature (61)..(61): /note="Nucleotide may be methylated to form 5-methylcytosine"
ccgggagcacgacggatagaatgcgcggggtcgagacggtgtcggtagcgggggccgcagcgctttgcaaagccggcctctgcccccggcctccttggagggcggtagcgggacctgcgctc

SEQ ID NO: 2121 - DNA, 122 bp, Homo sapiens
  misc_feature (61)..(62): /note="This region represents a CpG dinucleotide"
  misc_feature (61)..(61): /note="Nucleotide may be methylated to form 5-methylcytosine"
acacttttaatagaccccagagctgtggtgacagcatgcccttcccagtttttccacagacggtgctcctgaaattttccatagacagtgtattcttgtggttaattagttatctgagcaat

SEQ ID NO: 2122 - DNA, 122 bp, Homo sapiens
  misc_feature (61)..(62): /note="This region represents a CpG dinucleotide"
  misc_feature (61)..(61): /note="Nucleotide may be methylated to form 5-methylcytosine"
tgacctgcctttccatggggccccacccaggcctggcactcagtggtaaatattctcttccgcagagcccttattgctcccctcaaaggtgggggttgcgggggggcagggaattagcctcc

SEQ ID NO: 2123 - DNA, 122 bp, Homo sapiens
  misc_feature (61)..(62): /note="This region represents a CpG dinucleotide"
  misc_feature (61)..(61): /note="Nucleotide may be methylated to form 5-methylcytosine"
cccacctaactcttactcatccttttaagacaaagcccaggcccacttcctccaggaagtcggaattaggctggataagtgtctgaatgtctcttaggccagttgctctcagccaaggaaac

SEQ ID NO: 2124 - DNA, 122 bp, Homo sapiens
  misc_feature (61)..(62): /note="This region represents a CpG dinucleotide"
  misc_feature (61)..(61): /note="Nucleotide may be methylated to form 5-methylcytosine"
tttatcttcctcctgtggaatgtaagctgcttgagagcaaggaccttatctgttcattaacgtaacctccagtgtcttgaacctcctggcataggttggtgtttgtgtaactttgtatgtac

SEQ ID NO: 2125 - DNA, 122 bp, Homo sapiens
  misc_feature (61)..(62): /note="This region represents a CpG dinucleotide"
  misc_feature (61)..(61): /note="Nucleotide may be methylated to form 5-methylcytosine"
ttaattcctgagcacctgagattggccacctcgaggatgaggactggggccagagatgttcggcttggaccacgcccactgctcaaggtcaaggacccagacatcattgctcctgtgaatta

SEQ ID NO: 2126 - DNA, 122 bp, Homo sapiens
  misc_feature (61)..(62): /note="This region represents a CpG dinucleotide"
  misc_feature (61)..(61): /note="Nucleotide may be methylated to form 5-methylcytosine"
atcccaatgagtcaggagttattcatttattttctgctttgatgacaatatccattgatacggttataatccaagttggtgttttaaggcgcaatttttactcagctgtactccgtttcctt

SEQ ID NO: 2127 - DNA, 122 bp, Homo sapiens
  misc_feature (61)..(62): /note="This region represents a CpG dinucleotide"
  misc_feature (61)..(61): /note="Nucleotide may be methylated to form 5-methylcytosine"
tttttttgtgtgtgttcttgcttttaaaagtaaagctatatatatgccaaaacaaaaattcgttgttttccagtgtcattaaaaacagaatctaggccgggtgcagtgactcatgcctataa

SEQ ID NO: 2128 - DNA, 122 bp, Homo sapiens
  misc_feature (61)..(62): /note="This region represents a CpG dinucleotide"
  misc_feature (61)..(61): /note="Nucleotide may be methylated to form 5-methylcytosine"
aggattgttcttttgtttgttgttgttctcctttcctccccctattttctcttcagaggacgtgagacttcacaaccttctaaaaatgagctttcctagcaactagggacttacctgtctag

SEQ ID NO: 2129 - DNA, 122 bp, Homo sapiens
  misc_feature (61)..(62): /note="This region represents a CpG dinucleotide"
  misc_feature (61)..(61): /note="Nucleotide may be methylated to form 5-methylcytosine"
accttgtctcaaaaaaaagagtactagttctagacttgacacatttgaccttttagtactcgttagtactaacacacaaatcatcacctatataaaattggtctcactgcagttgagtcaaa

SEQ ID NO: 2130 - DNA, 122 bp, Homo sapiens
  misc_feature (61)..(62): /note="This region represents a CpG dinucleotide"
  misc_feature (61)..(61): /note="Nucleotide may be methylated to form 5-methylcytosine"
atctagcactttgcctcccccaaagacagcaccgccgcctacctgtcaccctgctgtctccggcttcctaccgccgccgcctcccgcagcagcctgccaactgcagcgcaacaaccaaccct

SEQ ID NO: 2131 - DNA, 122 bp, Homo sapiens
  misc_feature (61)..(62): /note="This region represents a CpG dinucleotide"
  misc_feature (61)..(61): /note="Nucleotide may be methylated to form 5-methylcytosine"
tggcggggccgtgggacccggccgccctttctcctccgtggctccccagccaggaggctgcgcttacctgctccgcacgacctctgcggcttgggggctctcagctctgtcgctgcggggct

SEQ ID NO: 2132 - DNA, 122 bp, Homo sapiens
  misc_feature (61)..(62): /note="This region represents a CpG dinucleotide"
  misc_feature (61)..(61): /note="Nucleotide may be methylated to form 5-methylcytosine"
cctcatagagctttatagagatcaaagagataatgggtcaaaaattgttagtttcgtgctcgcatataataagggctcagtgaatggtagctattattagggatgtcaaaagggttgcccag

SEQ ID NO: 2133 - DNA, 122 bp, Homo sapiens
  misc_feature (61)..(62): /note="This region represents a CpG dinucleotide"
  misc_feature (61)..(61): /note="Nucleotide may be methylated to form 5-methylcytosine"
aggagaagtggatcaaaggcatgaggcaggcaggcccaacaaagttgttactgacagagccgtaggcaggaagggagtggctggcgatgagtctggaaaaggagttgtgattgggagtcatt

SEQ ID NO: 2134 - DNA, 122 bp, Homo sapiens
  misc_feature (61)..(62): /note="This region represents a CpG dinucleotide"
  misc_feature (61)..(61): /note="Nucleotide may be methylated to form 5-methylcytosine"
gtgatgggagatttctacaacctggagaaggcaacaaactgctcactaactcagtgatcccgagacaacctggctggtacaggcagctgcaaagcagacaggcctgcagagatgagctaacc

SEQ ID NO: 2135 - DNA, 122 bp, Homo sapiens
  misc_feature (61)..(62): /note="This region represents a CpG dinucleotide"
  misc_feature (61)..(61): /note="Nucleotide may be methylated to form 5-methylcytosine"
gaaggtaagggaagagaacaagaatctctggtaatccagagaattctttccaatcttatccgagaccacaaggtggtacctctatgagcctgcaaaaaccacaacattactgggttcagggt

SEQ ID NO: 2136 - DNA, 122 bp, Homo sapiens
  misc_feature (61)..(62): /note="This region represents a CpG dinucleotide"
  misc_feature (61)..(61): /note="Nucleotide may be methylated to form 5-methylcytosine"
ctcagggtcatgttctaaatgttatctagaagagcagtctttgaataatctttggcatagcggtcaggatcacggaccgatggtctgaagccaataatgctaactctaccacttaccaggtg

SEQ ID NO: 2137 - DNA, 122 bp, Homo sapiens
  misc_feature (61)..(62): /note="This region represents a CpG dinucleotide"
  misc_feature (61)..(61): /note="Nucleotide may be methylated to form 5-methylcytosine"
taataaataagacacagtaacaaatgttggcaagaacgtggagaaattggaaccctcctacgttgctgatgggatttaaaatggttcaaccactttggaaaacagactggcatttcctcaaa

SEQ ID NO: 2138 - DNA, 122 bp, Homo sapiens
  misc_feature (61)..(62): /note="This region represents a CpG dinucleotide"
  misc_feature (61)..(61): /note="Nucleotide may be methylated to form 5-methylcytosine"
tccacctgggccaggcccgcatctgctgcccagcaacgagtgcgtggagctcttcagaaccgcctacttctgcagaggtgaggctgttctctctgggcacatgagcttccaccccctacctc

SEQ ID NO: 2139 - DNA, 122 bp, Homo sapiens
  misc_feature (61)..(62): /note="This region represents a CpG dinucleotide"
  misc_feature (61)..(61): /note="Nucleotide may be methylated to form 5-methylcytosine"
agtgtgccctgggcagcgccgcgccgggagcacccggaaccgcgcaggcggcggcgtgcccgcccccgcccccgccctgtcaggtccccagggccgcctcccttgtgccggcctcgcagctc

SEQ ID NO: 2140 - DNA, 122 bp, Homo sapiens
  misc_feature (61)..(62): /note="This region represents a CpG dinucleotide"
  misc_feature (61)..(61): /note="Nucleotide may be methylated to form 5-methylcytosine"
tcatccatgccaatgacctctgcctcgtcactcatgataccatctctctgccctcagatccggggttccctggcttcctggacaccttgccctaggtgccccccagcctctcactcctacta

SEQ ID NO: 2141 - DNA, 122 bp, Homo sapiens
  misc_feature (61)..(62): /note="This region represents a CpG dinucleotide"
  misc_feature (61)..(61): /note="Nucleotide may be methylated to form 5-methylcytosine"
gtgcccgttattggccaattgtctcctacagccacagtggatcttttctacttggctctgcggtgttaaggctgggagtttgcaaattctcttgggtgtgggatctgggtgtcccaggctct

SEQ ID NO: 2142 - DNA, 122 bp, Homo sapiens
  misc_feature (61)..(62): /note="This region represents a CpG dinucleotide"
  misc_feature (61)..(61): /note="Nucleotide may be methylated to form 5-methylcytosine"
agcgccccgattccgggccgcggctcccggcgccctcgctgccccgtcccgtcccgcgcccgtcgggccgccctcgccgcctcacccggcctcgcctctcagagcctctcccctccccgccg

SEQ ID NO: 2143 - DNA, 122 bp, Homo sapiens
  misc_feature (61)..(62): /note="This region represents a CpG dinucleotide"
  misc_feature (61)..(61): /note="Nucleotide may be methylated to form 5-methylcytosine"
ccactgagtcaccggcgctcggggaggggccaggtccactgccagttgaatctggttctgcggtcgcttgctttggggaactcaggcaagcgtcctgaacacttcaaaacctcccaatgatc

SEQ ID NO: 2144 - DNA, 122 bp, Homo sapiens
  misc_feature (61)..(62): /note="This region represents a CpG dinucleotide"
  misc_feature (61)..(61): /note="Nucleotide may be methylated to form 5-methylcytosine"
cagcacgcagcccctccgggagccagggaaaaccgccggcgaagatctggagcggtaaggcggagagaagggtctttccacctgcgcggctgcagccggcggatccctcttcccaggctccg

SEQ ID NO: 2145 - DNA, 122 bp, Homo sapiens
  misc_feature (61)..(62): /note="This region represents a CpG dinucleotide"
  misc_feature (61)..(61): /note="Nucleotide may be methylated to form 5-methylcytosine"
taggtctagagacagctataggagaggcaaggtatcctcagtctactacctccatgacaccggataaacacatatcaactggcttcaatgggatgcatagattgtagaattagaaagacttg

SEQ ID NO: 2146 - DNA, 122 bp, Homo sapiens
  misc_feature (61)..(62): /note="This region represents a CpG dinucleotide"
  misc_feature (61)..(61): /note="Nucleotide may be methylated to form 5-methylcytosine"
ccttaccctgcccccttgccttgtatacaataaataacagcgtggccaggcatttggggccgctaccggtctccgcgtcttggtggtagtggtaccccaagcccagctgtcttttcttctat

SEQ ID NO: 2147 - DNA, 122 bp, Homo sapiens
  misc_feature (61)..(62): /note="This region represents a CpG dinucleotide"
  misc_feature (61)..(61): /note="Nucleotide may be methylated to form 5-methylcytosine"
tgatgtattacctacagagagtaacaatttgaatgagagcagacttctcataagaaactgcggagaaagtggaatacattactggcgggaaagcaaatggttcagatgctgagaaaaacagt

SEQ ID NO: 2148 - DNA, 122 bp, Homo sapiens
  misc_feature (61)..(62): /note="This region represents a CpG dinucleotide"
  misc_feature (61)..(61): /note="Nucleotide may be methylated to form 5-methylcytosine"
tgtgcactaaactattactggcctgaatatcgtgtggttagaaagaacttgataccaccacgtaggtgtgcgaggtgtgcgattttagacacaagaatagcacctttttatgctcttgtaaa

SEQ ID NO: 2149 - DNA, 122 bp, Homo sapiens
  misc_feature (61)..(62): /note="This region represents a CpG dinucleotide"
  misc_feature (61)..(61): /note="Nucleotide may be methylated to form 5-methylcytosine"
aagtgtgcagaaaaatgagtcaccttcaatatgaaggatgtgagttgtgtacactgacaacggtctcaaagatacaacattattgcaggaggaatgcctgtgtacagagtggaccatcttat

SEQ ID NO: 2150 - DNA, 122 bp, Homo sapiens
  misc_feature (61)..(62): /note="This region represents a CpG dinucleotide"
  misc_feature (61)..(61): /note="Nucleotide may be methylated to form 5-methylcytosine"
gtttcagcaaaaacaacattcagttggtgaactaacctacagttctcttctcataaaatgcgttcaacaatacaaaagtttgattgttttaaagagtaatctgccacagattataatcaatg

SEQ ID NO: 2151 - DNA, 122 bp, Homo sapiens
  misc_feature (61)..(62): /note="This region represents a CpG dinucleotide"
  misc_feature (61)..(61): /note="Nucleotide may be methylated to form 5-methylcytosine"
ctatttctgtctcctttttatagctaagggaactgaaccacagacaggttaagtggcttgcgcaagattgcacagccagtaagtagtagagccagcttcgaaatccaggcactcttgcagca

SEQ ID NO: 2152 - DNA, 122 bp, Homo sapiens
  misc_feature (61)..(62): /note="This region represents a CpG dinucleotide"
  misc_feature (61)..(61): /note="Nucleotide may be methylated to form 5-methylcytosine"
tcgcctcggcgcgggccgcgacgctctccgccccgagggcacgctcccggggctcttggccgcccctcgcccaccgggctctgggtagcccctcaccaggctcttggcggccacctagcccg

SEQ ID NO: 2153 - DNA, 122 bp, Homo sapiens
  misc_feature (61)..(62): /note="This region represents a CpG dinucleotide"
  misc_feature (61)..(61): /note="Nucleotide may be methylated to form 5-methylcytosine"
cgaagtcgccgccaatgttgacgaactcggtgtcgaaggcgagtggttggtgccgcggcccggggccagcgtccgagcccaccaagctgcgcgtgcgcgccgccgagaaggccgagcgcggc

SEQ ID NO: 2154 - DNA, 122 bp, Homo sapiens
  misc_feature (61)..(62): /note="This region represents a CpG dinucleotide"
  misc_feature (61)..(61): /note="Nucleotide may be methylated to form 5-methylcytosine"
ccagtaaacagtctttaaactgctggatcagtaagctgcttacagccttgcaagcgctgacgccacatctgctcggcaattcatgtgctctcaagccaaggatttagaatccatgtttgtca

SEQ ID NO: 2155 - DNA, 122 bp, Homo sapiens
  misc_feature (61)..(62): /note="This region represents a CpG dinucleotide"
  misc_feature (61)..(61): /note="Nucleotide may be methylated to form 5-methylcytosine"
gaaaccacaggtctaatcggagggcaacagtgtcatctggaagtgccggctcagggatgccgtcctgacggaagtcatgaatgctggaagtgggtctcgcagggtgagaggagtcaccaggt

SEQ ID NO: 2156 - DNA, 122 bp, Homo sapiens
  misc_feature (61)..(62): /note="This region represents a CpG dinucleotide"
  misc_feature (61)..(61): /note="Nucleotide may be methylated to form 5-methylcytosine"
gctgctcgcgctccgccgcccgggagatgcttcctcgcgcggcgcagcgctgaggccgtgcgtgcgccccggctgcgctgcgcgctccccacatacacaagctctccatgtgagctgacagg

SEQ ID NO: 2157 - DNA, 122 bp, Homo sapiens
  misc_feature (61)..(62): /note="This region represents a CpG dinucleotide"
  misc_feature (61)..(61): /note="Nucleotide may be methylated to form 5-methylcytosine"
tcttgcgcggcgtccggtgcagagccagcagtacgctgctgttgcccagcacggccaccgcgaaagtcaccgccagcacggcgatctccagtttggccagctcctcgttgcgcacgtccctc

SEQ ID NO: 2158 - DNA, 122 bp, Homo sapiens
  misc_feature (61)..(62): /note="This region represents a CpG dinucleotide"
  misc_feature (61)..(61): /note="Nucleotide may be methylated to form 5-methylcytosine"
tgatttttttaattctctctcctgaagcccaggtaggatacaaaaccaagtctggtggcacgtatgaggaggagctcaggacacgagcaggacctgggtagcagggttagcttgtccttggt

SEQ ID NO: 2159 - DNA, 122 bp, Homo sapiens
  misc_feature (61)..(62): /note="This region represents a CpG dinucleotide"
  misc_feature (61)..(61): /note="Nucleotide may be methylated to form 5-methylcytosine"
gagacgccttccagagacgtaggagacgcaagttctcttcctggcttaagtcctagaagccgtctaagaaaggatacccatgtcctttgctctcaagagaaaaagcatagaaacatattttg

SEQ ID NO: 2160 - DNA, 122 bp, Homo sapiens
  misc_feature (61)..(62): /note="This region represents a CpG dinucleotide"
  misc_feature (61)..(61): /note="Nucleotide may be methylated to form 5-methylcytosine"
taactttagccaacatgttcacacacagaatctcttacaattaatgttctataaaccttccgtaacttgttcaaatctttagctttatttaacaatcctttaaccctctaacctaggcaaaa

SEQ ID NO: 2161 - DNA, 122 bp, Homo sapiens
  misc_feature (61)..(62): /note="This region represents a CpG dinucleotide"
  misc_feature (61)..(61): /note="Nucleotide may be methylated to form 5-methylcytosine"
atacagacttacaccatgactaaaggttcttttaatctttgttccctatctctgtctttccgtaaaatggtccatctaaattttcttaccttcctaaagtggaatgaggattatctattaaa

SEQ ID NO: 2162 - DNA, 122 bp, Homo sapiens
  misc_feature (61)..(62): /note="This region represents a CpG dinucleotide"
  misc_feature (61)..(61): /note="Nucleotide may be methylated to form 5-methylcytosine"
gatcgagacgcagcagctgatgcgggtgtacggggccctcatgtggtccttggggaagatcgtgaacaccccagaggtgatccgggtctacatcggctccttctggtcccaccccctcctca

SEQ ID NO: 2163 - DNA, 122 bp, Homo sapiens
  misc_feature (61)..(62): /note="This region represents a CpG dinucleotide"
  misc_feature (61)..(61): /note="Nucleotide may be methylated to form 5-methylcytosine"
gcggcggcggcgggcggactggggagtccgcagcacctgcgagctggtgttgggtccccgcggcgaggctgcctggaggaggagcgagcggatgctgccctcgcccgccgccgccggtgctg

SEQ ID NO: 2164 - DNA, 122 bp, Homo sapiens
  misc_feature (61)..(62): /note="This region represents a CpG dinucleotide"
  misc_feature (61)..(61): /note="Nucleotide may be methylated to form 5-methylcytosine"
aaaataaccagttgcttcctattttttttcgaggctgttttgcaccagtctgaagcctgacgcaagcaaaatctcgaaaaaacaatgctagctttcaaagcgttgaggtgcaggcctgcaga

SEQ ID NO: 2165 - DNA, 122 bp, Homo sapiens
  misc_feature (61)..(62): /note="This region represents a CpG dinucleotide"
  misc_feature (61)..(61): /note="Nucleotide may be methylated to form 5-methylcytosine"
cttcccttttatgggctgacctctcctctacattctgtttgcttactgaccttctaggtgcgtgagctgtgtggtttgttacatccacaggctggctgaacgtacttagatttatcacacct

SEQ ID NO: 2166 - DNA, 122 bp, Homo sapiens
  misc_feature (61)..(62): /note="This region represents a CpG dinucleotide"
  misc_feature (61)..(61): /note="Nucleotide may be methylated to form 5-methylcytosine"
gcgggcggcagccgcaagcgaggaatccagcgcagggaaagtagccccagtggggcccggcgcgtcagccccactcgcgtggcaaaacttgcgggggcccccgcgtgccgcgcctcagccca

SEQ ID NO: 2167 - DNA, 122 bp, Homo sapiens
  misc_feature (61)..(62): /note="This region represents a CpG dinucleotide"
  misc_feature (61)..(61): /note="Nucleotide may be methylated to form 5-methylcytosine"
cccaccctataattctctactcaactccaagaaagataagtcaaaatgccacattctgagcggggaggagctatcttctcttttggctctcaccccaccccttggcacagtacaattaatta

SEQ ID NO: 2168 - DNA, 122 bp, Homo sapiens
  misc_feature (61)..(62): /note="This region represents a CpG dinucleotide"
  misc_feature (61)..(61): /note="Nucleotide may be methylated to form 5-methylcytosine"
gcagccttaatgttaatacagagatcacaagactgacagaacagactctttgtggcaatacgataacaaattataaacaggatctaaggccatgccaggaagggttaagtcacgcaccctta

SEQ ID NO: 2169 - DNA, 122 bp, Homo sapiens
  misc_feature (61)..(62): /note="This region represents a CpG dinucleotide"
  misc_feature (61)..(61): /note="Nucleotide may be methylated to form 5-methylcytosine"
tgcaactttgtctttctacattgctctgtcataaagaagaatacctttatggacagaacacgggcttaggatcccataagcccaggttcaagccagcctggaaaactggttaattacagact

SEQ ID NO: 2170 - DNA, 122 bp, Homo sapiens
  misc_feature (61)..(62): /note="This region represents a CpG dinucleotide"
  misc_feature (61)..(61): /note="Nucleotide may be methylated to form 5-methylcytosine"
tacactctggcgcgctgagggcggtgagcgagggcgccaaggcacaggtggggcgggagtcgagcgcggaggctcggggggcgggacgcggggcctgggagcggccagggaccgcggcagcg

SEQ ID NO: 2171 - DNA, 122 bp, Homo sapiens
  misc_feature (61)..(62): /note="This region represents a CpG dinucleotide"
  misc_feature (61)..(61): /note="Nucleotide may be methylated to form 5-methylcytosine"
ctgcattgtagaatttctcgccctgcaggttatggaagtggatccttcccaggtgatgtgcgagggaagacacatttactatccttgatggggctgattcctttagtttctctagcagcaga

SEQ ID NO: 2172 - DNA, 122 bp, Homo sapiens
  misc_feature (61)..(62): /note="This region represents a CpG dinucleotide"
  misc_feature (61)..(61): /note="Nucleotide may be methylated to form 5-methylcytosine"
tactgcagatacctcaacaaatgatctgataaccaagacggctcctaagtgagtaacaggcgggaagtgtctacaacatgaatatgttggataaagggatgattcatgacccaggcaggaaa

SEQ ID NO: 2173 - DNA, 122 bp, Homo sapiens
  misc_feature (61)..(62): /note="This region represents a CpG dinucleotide"
  misc_feature (61)..(61): /note="Nucleotide may be methylated to form 5-methylcytosine"
agcttgtgccatatattgccattttctccaaggggtgttaaataatttcccacctctgcacgttattatgactctcagtactcacatcgctctggaggtcataggcctgccgagcatggatg

SEQ ID NO: 2174 - DNA, 122 bp, Homo sapiens
  misc_feature (61)..(62): /note="This region represents a CpG dinucleotide"
  misc_feature (61)..(61): /note="Nucleotide may be methylated to form 5-methylcytosine"
gggactacaggtgtgcactaccacaccaggccaatttttgttttttttttttggtagaaacgggtctgttttgcccaggctggtcttcaactcctggactcaaatgatccacctgcctctgc

SEQ ID NO: 2175 - DNA, 122 bp, Homo sapiens
  misc_feature (61)..(62): /note="This region represents a CpG dinucleotide"
  misc_feature (61)..(61): /note="Nucleotide may be methylated to form 5-methylcytosine"
aaaatcattgaagttggagatacaccgaaagatagagctttattcaatggagcccagaaacgtgagcattaatgcaattaaagagcattctccaaatttgagagtgctcgtggtaaagatgt

SEQ ID NO: 2176 - DNA, 122 bp, Homo sapiens
  misc_feature (61)..(62): /note="This region represents a CpG dinucleotide"
  misc_feature (61)..(61): /note="Nucleotide may be methylated to form 5-methylcytosine"
ctaggtttgtggaagtacactctatgttgtttgcacaatgacaaaatcacctcagcaacacgtgattgactgtatttaattgtattaaaaatgtttgttgtagaaaaaaatggaaaaaatga

SEQ ID NO: 2177 - DNA, 122 bp, Homo sapiens
  misc_feature (61)..(62): /note="This region represents a CpG dinucleotide"
  misc_feature (61)..(61): /note="Nucleotide may be methylated to form 5-methylcytosine"
actccatctcaaaaaaaaaaaagaaaaaaatcgtaggctcagagaagcctacgataataacgatgatggtggtgatgccacgttaagtactaggagaaaatatagctacctatttatgcagt

SEQ ID NO: 2178 - DNA, 122 bp, Homo sapiens
  misc_feature (61)..(62): /note="This region represents a CpG dinucleotide"
  misc_feature (61)..(61): /note="Nucleotide may be methylated to form 5-methylcytosine"
tgattccaaaacactcttacctctaagccaatttgcatattctccatgcccacacacacgcgtacactgggatggcagtagggtcatatatgtcttgaaacttcatgcctcaatacgatatt

SEQ ID NO: 2179 - DNA, 122 bp, Homo sapiens
  misc_feature (61)..(62): /note="This region represents a CpG dinucleotide"
  misc_feature (61)..(61): /note="Nucleotide may be methylated to form 5-methylcytosine"
ctcacaaccaaactattatagagacaaaaatttgataaattcaagcaccaattttgttcacgacattgtataggtttcatgaatcccctgacctcaaggacagtttgctgataagcaaacta

SEQ ID NO: 2180 - DNA, 122 bp, Homo sapiens
  misc_feature (61)..(62): /note="This region represents a CpG dinucleotide"
  misc_feature (61)..(61): /note="Nucleotide may be methylated to form 5-methylcytosine"
ggcgcccgcgggacgggccctcggcggcgcggggaagccccaaggccggggcggagcctacgtccttccgccgccactgtcgctcgcgctccacaggtagggagcgcaaagtcccgggagcc

SEQ ID NO: 2181 - DNA, 122 bp, Homo sapiens
  misc_feature (61)..(62): /note="This region represents a CpG dinucleotide"
  misc_feature (61)..(61): /note="Nucleotide may be methylated to form 5-methylcytosine"
gagggaggaggattgctggagacccagggtctgaggctgcagagagctatgatctcaccacggagctccagcctggacgacaaagcaaaaccatgtctccgaaggaaaaaaaacgtaatttc

SEQ ID NO: 2182 - DNA, 122 bp, Homo sapiens
  misc_feature (61)..(62): /note="This region represents a CpG dinucleotide"
  misc_feature (61)..(61): /note="Nucleotide may be methylated to form 5-methylcytosine"
cacataatgagacaaagcaactcatcacaggataagaataaaaatcaagtggactgatggcgttgagtgtcacatgaggcttagattttgggatcagcagcatcaacatcaccttcaagctt

SEQ ID NO: 2183 - DNA, 122 bp, Homo sapiens
  misc_feature (61)..(62): /note="This region represents a CpG dinucleotide"
  misc_feature (61)..(61): /note="Nucleotide may be methylated to form 5-methylcytosine"
ctccgggccgggccccgcccctctcgctggcggactcagcgcgtcctccgccagccctcgcgtctgctgcccccgccatccagttggtgcggtccatggcgagcgcatcatggcgattgaag

SEQ ID NO: 2184 - DNA, 122 bp, Homo sapiens
  misc_feature (61)..(62): /note="This region represents a CpG dinucleotide"
  misc_feature (61)..(61): /note="Nucleotide may be methylated to form 5-methylcytosine"
cgtcatgagatttcatcacgctgctcagaactgcaattcaaaacgtatgaattgtttattcgtggaattttccatttagtattttcagaccagggttgactgcaggtaactgaactgtggaa

SEQ ID NO: 2185 - DNA, 122 bp, Homo sapiens
  misc_feature (61)..(62): /note="This region represents a CpG dinucleotide"
  misc_feature (61)..(61): /note="Nucleotide may be methylated to form 5-methylcytosine"
ctctaaataagattagcaaaacgataaattaacaggagaaaaatagagagtttattaacacgtgcagcacacatcacacaggagaaacctcagtgatgagtaactcaaagtttcaagagttt

SEQ ID NO: 2186 - DNA, 122 bp, Homo sapiens
  misc_feature (61)..(62): /note="This region represents a CpG dinucleotide"
  misc_feature (61)..(61): /note="Nucleotide may be methylated to form 5-methylcytosine"
ctgcctgcagggtaaacacagcagcagcttcctccgaagcagcgaatctaaaattgccaacgctaacacaaagaatcagaggaacatgttggcacatgactgagaggctcaaacaattacac

SEQ ID NO: 2187 - DNA, 122 bp, Homo sapiens
  misc_feature (61)..(62): /note="This region represents a CpG dinucleotide"
  misc_feature (61)..(61): /note="Nucleotide may be methylated to form 5-methylcytosine"
ttcccacaatttcataaggtaggtaaaataaagattattattatcatctcattttatatacgaggcagggagggccctaattaatgtacttatttcaaagtctggcatctcttaacaataaa

SEQ ID NO: 2188 - DNA, 122 bp, Homo sapiens
  misc_feature (61)..(62): /note="This region represents a CpG dinucleotide"
  misc_feature (61)..(61): /note="Nucleotide may be methylated to form 5-methylcytosine"
gtctgaggcaatgtttgcatttcgaagctgcaggaaatctagtcatgctggggaagtggtcgtggagtcggccgtcatgggattcccgtgggaggacctgcctgaaaagagatgagagtttc

SEQ ID NO: 2189 - DNA, 122 bp, Homo sapiens
  misc_feature (61)..(62): /note="This region represents a CpG dinucleotide"
  misc_feature (61)..(61): /note="Nucleotide may be methylated to form 5-methylcytosine"
tacaacttatttttttaatttaaaatatggaatgcctaacgaatatgcgtgtcatccttgcgcaggggccatgctaattaccgtatcattccaattttagtatatgtgctgctgaagggagc

SEQ ID NO: 2190 - DNA, 122 bp, Homo sapiens
  misc_feature (61)..(62): /note="This region represents a CpG dinucleotide"
  misc_feature (61)..(61): /note="Nucleotide may be methylated to form 5-methylcytosine"
ttatgaaaagctcatggggacaatgcccccaagaaaccagcagtttgcaaatggaaaactcgttttaagaagggatgaggccaggcgtggtggctcagcctgtaatcccagcactttgggag

SEQ ID NO: 2191 - DNA, 122 bp, Homo sapiens
  misc_feature (61)..(62): /note="This region represents a CpG dinucleotide"
  misc_feature (61)..(61): /note="Nucleotide may be methylated to form 5-methylcytosine"
attaaagcctccaacttgtgtttggacagtggccactgctctacctaaacaggtgactcacgcatccattgtgcagggacagaggaagagaaggagagtgagggcgctgggatgcggactga

SEQ ID NO: 2192 - DNA, 122 bp, Homo sapiens
  misc_feature (61)..(62): /note="This region represents a CpG dinucleotide"
  misc_feature (61)..(61): /note="Nucleotide may be methylated to form 5-methylcytosine"
taaggctgcctttgactgagtaccgagtgagctgagcttgaacctttctgtcttacccagcgccctgactagtcatgaatggtcacagaggctgacacatactttttgataatcatgataat

SEQ ID NO: 2193 - DNA, 122 bp, Homo sapiens
  misc_feature (61)..(62): /note="This region represents a CpG dinucleotide"
  misc_feature (61)..(61): /note="Nucleotide may be methylated to form 5-methylcytosine"
atctgttttattctctgctgaataaccagcactcggtgctccataaatagttgttgaacgcgtgcgtgaatgagtgagtgaaaggctcctagtaccatgctaatctccactagtacctcccg

SEQ ID NO: 2194 - DNA, 122 bp, Homo sapiens
  misc_feature (61)..(62): /note="This region represents a CpG dinucleotide"
  misc_feature (61)..(61): /note="Nucleotide may be methylated to form 5-methylcytosine"
tatattcctgtcagccccactaaaatgtcagttcagtggccgggtgtggtagctcacgaccgtaatcccagcactttgggaggccgaggcagatggatcacctgagaggtcagaagttcgag

SEQ ID NO: 2195 - DNA, 122 bp, Homo sapiens
  misc_feature (61)..(62): /note="This region represents a CpG dinucleotide"
  misc_feature (61)..(61): /note="Nucleotide may be methylated to form 5-methylcytosine"
ggtagctttttcttttttattttgagatctcactctgttgcccaggctatagtctaatggcgtggtaacagctcactgcagcctcaatctcctgggcttaagcaattccttccacctcagcc

SEQ ID NO: 2196 - DNA, 122 bp, Homo sapiens
  misc_feature (61)..(62): /note="This region represents a CpG dinucleotide"
  misc_feature (61)..(61): /note="Nucleotide may be methylated to form 5-methylcytosine"
tctaaaacttgcgggaagccatggcaggtttggtgactagtgactagtgtgatgaggaagcgacaagagaggaagttgatcaagcactctgcatgctatgctgagatatcggaaacttattc

SEQ ID NO: 2197 - DNA, 122 bp, Homo sapiens
  misc_feature (61)..(62): /note="This region represents a CpG dinucleotide"
  misc_feature (61)..(61): /note="Nucleotide may be methylated to form 5-methylcytosine"
ggtgcagggctggggaggctcagagcctgcatcaaaagtggcttcggcttctgtaaacagcgtcattcccagcattccttgccaagatggggctttatgtgtcccagagagagtcagcagaa

SEQ ID NO: 2198 - DNA, 122 bp, Homo sapiens
  misc_feature (61)..(62): /note="This region represents a CpG dinucleotide"
  misc_feature (61)..(61): /note="Nucleotide may be methylated to form 5-methylcytosine"
tgactgcccatagccgtatccctgctagaaaacactgggcaggtcacagcggcagtgaggcgtggtacgaagtgatgggctggcagcagcacagggctgtgggataataggctcgctgtgac

SEQ ID NO: 2199 - DNA, 122 bp, Homo sapiens
  misc_feature (61)..(62): /note="This region represents a CpG dinucleotide"
  misc_feature (61)..(61): /note="Nucleotide may be methylated to form 5-methylcytosine"
aagctggcaaagatgagcatcaaatcaccagacgtgcatggagagcatgagctgaacgaccgtcgtgataggcttggcagaggatgaagcagagggtggcaccggagccctacctgggtgct

SEQ ID NO: 2200 - DNA, 122 bp, Homo sapiens
  misc_feature (61)..(62): /note="This region represents a CpG dinucleotide"
  misc_feature (61)..(61): /note="Nucleotide may be methylated to form 5-methylcytosine"
cccgtcctagctgtggggagactcacctctgagagtccagtgtcaaaccagctgggtgcccgcaggaaggagggtggccgaaggtagaagggactcagggaagtagacgtcgggaaaagatc

SEQ ID NO: 2201 - DNA, 122 bp, Homo sapiens
  misc_feature (61)..(62): /note="This region represents a CpG dinucleotide"
  misc_feature (61)..(61): /note="Nucleotide may be methylated to form 5-methylcytosine"
ctcacaaaacaaaaaagaatcaatgcggatttcaggggtatgattaactggaaaataccgcggaagttatgtaacgtagcataaaatggaagtgttttgtaactgatttggctccttctgtg

SEQ ID NO: 2202 - DNA, 122 bp, Homo sapiens
  misc_feature (61)..(62): /note="This region represents a CpG dinucleotide"
  misc_feature (61)..(61): /note="Nucleotide may be methylated to form 5-methylcytosine"
tagaaatttccaggtatgtggggaccccacgtcccctgggacagaagtcccagggacctgcggagcgcagacataacacaacacagagcaaaactcaccgctgcggtgactttcactccacg

SEQ ID NO: 2203 - DNA, 122 bp, Homo sapiens
  misc_feature (61)..(62): /note="This region represents a CpG dinucleotide"
  misc_feature (61)..(61): /note="Nucleotide may be methylated to form 5-methylcytosine"
agtgtccatgcgtcaccttgctggtgatgcttcactggatcacttggttccggggttgtccgcacgtctccctgtagtgcaggtgctccttcctgtttccaattagcctgtgggatgggact

SEQ ID NO: 2204 - DNA, 122 bp, Homo sapiens
  misc_feature (61)..(62): /note="This region represents a CpG dinucleotide"
  misc_feature (61)..(61): /note="Nucleotide may be methylated to form 5-methylcytosine"
ttcaatgcgctaacgaggcacgttattcttagccgcgtccgggaggggatcacattcctgcgcagttgcgctgctggcggaagtgacttgttttctaacgaccctcgtgacagccagagaat

SEQ ID NO: 2205 - DNA, 122 bp, Homo sapiens
  misc_feature (61)..(62): /note="This region represents a CpG dinucleotide"
  misc_feature (61)..(61): /note="Nucleotide may be methylated to form 5-methylcytosine"
tgggcaaggtcacacagggcaaacagatcaccagttttggtccactccaccgatgacgcacggggacaccctccggagtataaacagccaggggcttgcacaggcacactcacattggacgt

SEQ ID NO: 2206 - DNA, 122 bp, Homo sapiens
  misc_feature (61)..(62): /note="This region represents a CpG dinucleotide"
  misc_feature (61)..(61): /note="Nucleotide may be methylated to form 5-methylcytosine"
gtagaaatgatgataaaggctcatgcccatggtttcctcttgcttcttctgcctcctgaccgacactggtgcttccccgtgtggccctgtgtggcttgttgtgccccttccctcttgggaac

SEQ ID NO: 2207 - DNA, 122 bp, Homo sapiens
  misc_feature (61)..(62): /note="This region represents a CpG dinucleotide"
  misc_feature (61)..(61): /note="Nucleotide may be methylated to form 5-methylcytosine"
tacaaaaaatagccagttgtgggagagttagcggcctccggtgtgggaaggccacggagccgggccggagacatggcccgggggcccggccagctaggcaggcctcgccccgatacggtcgc

SEQ ID NO: 2208 - DNA, 122 bp, Homo sapiens
  misc_feature (61)..(62): /note="This region represents a CpG dinucleotide"
  misc_feature (61)..(61): /note="Nucleotide may be methylated to form 5-methylcytosine"
cagaggcctgaaggttcatgccttacacccagaaacatgaatggagaaacagtggagaaacgttggtgcttttatagttgaaatgctaaaccagacattaaactcaaactctgttgggttat

SEQ ID NO: 2209 - DNA, 122 bp, Homo sapiens
  misc_feature (61)..(62): /note="This region represents a CpG dinucleotide"
  misc_feature (61)..(61): /note="Nucleotide may be methylated to form 5-methylcytosine"
ataacatcatggcattgttccttgggtagacagagccatgaccttggtatatctcatccccgcgaacaaaaatatccagaaatgtctttaagtgtctttaagctctcattttctattgaatt

SEQ ID NO: 2210 - DNA, 122 bp, Homo sapiens
  misc_feature (61)..(62): /note="This region represents a CpG dinucleotide"
  misc_feature (61)..(61): /note="Nucleotide may be methylated to form 5-methylcytosine"
ctcttgtcgaagggtgatgaagcaacttattgtggcagagaggcccccttgacagggaaacgggtgatctccagccagcagacatccagcaactgaaagaggcacaaggctgaaattcatcc

SEQ ID NO: 2211 - DNA, 122 bp, Homo sapiens
  misc_feature (61)..(62): /note="This region represents a CpG dinucleotide"
  misc_feature (61)..(61): /note="Nucleotide may be methylated to form 5-methylcytosine"
attggggttaaggcataatcaatatcatatatggagtgtctggcctattctgcataaacacgggcacttcatattattaaggagtctataatgccgaggaagcatatggcaggacactgcag

SEQ ID NO: 2212 - DNA, 122 bp, Homo sapiens
  misc_feature (61)..(62): /note="This region represents a CpG dinucleotide"
  misc_feature (61)..(61): /note="Nucleotide may be methylated to form 5-methylcytosine"
acaatggtactcaccactgacttaagcaatgcagagcacataagcactaagagactccttcggcagggcgtggtggctcctgcctgtaatcccagcactttgggagggtgaggtgggtggat

SEQ ID NO: 2213 - DNA, 122 bp, Homo sapiens
  misc_feature (61)..(62): /note="This region represents a CpG dinucleotide"
  misc_feature (61)..(61): /note="Nucleotide may be methylated to form 5-methylcytosine"
tcatactacgttcccttgcataatattcacaagatcctacttttggagagtggtgttggccgctcctagctggtgaataacacagaaacatcccaaagcctcttctcagcaaggatggggac

SEQ ID NO: 2214 - DNA, 122 bp, Homo sapiens
  misc_feature (61)..(62): /note="This region represents a CpG dinucleotide"
  misc_feature (61)..(61): /note="Nucleotide may be methylated to form 5-methylcytosine"
gttatgtacttgtgggtcatgatgttaaatgtgcttttccaagaatagccaagataaatccgaaaaagaaaaacaagcagggacgacttgccctaccagagttcagaacttgtcatgaaact

SEQ ID NO: 2215 - DNA, 122 bp, Homo sapiens
  misc_feature (61)..(62): /note="This region represents a CpG dinucleotide"
  misc_feature (61)..(61): /note="Nucleotide may be methylated to form 5-methylcytosine"
tcaaaacgtatttcctgtccacatgagtatgtgaaaccaaacttaatagccagacatagccgcaagaccagctcactatttccattttatccctcattttgttttcttcccctgaccctgag

SEQ ID NO: 2216 - DNA, 122 bp, Homo sapiens
  misc_feature (61)..(62): /note="This region represents a CpG dinucleotide"
  misc_feature (61)..(61): /note="Nucleotide may be methylated to form 5-methylcytosine"
cttatcatgaccattttgtatttctcagtccatgtatatccctggcacataatgggtgctcgcaatgatttctcgggttgaagttaaatccaggaagcccagtcactcacatgatgcatttc

SEQ ID NO: 2217 - DNA, 122 bp, Homo sapiens
  misc_feature (61)..(62): /note="This region represents a CpG dinucleotide"
  misc_feature (61)..(61): /note="Nucleotide may be methylated to form 5-methylcytosine"
ggccaggactttgctctagaaggagaaggggagggcaccgcctggggctttggctctcctcggatcctccagccgtctccctgagcgcccacctcagcaggagcctggtagaagccaacact

SEQ ID NO: 2218 - DNA, 122 bp, Homo sapiens
  misc_feature (61)..(62): /note="This region represents a CpG dinucleotide"
  misc_feature (61)..(61): /note="Nucleotide may be methylated to form 5-methylcytosine"
ccttgctaggaagggctaagtctttaacatacattatctcccttaatcctaaaacaatcccgtaactattaatgttcccacttcataaatgaggaaacagagcttagagaaagaagctactt

SEQ ID NO: 2219 - DNA, 122 bp, Homo sapiens
  misc_feature (61)..(62): /note="This region represents a CpG dinucleotide"
  misc_feature (61)..(61): /note="Nucleotide may be methylated to form 5-methylcytosine"
actgattcctggggagtcagtccctgtaaattgagtggagagagggatagaggcctatttcgcagagaaaagggatggtcatcggcttccaggctgagcagacacttaaaaaaatgatccga

SEQ ID NO: 2220 - DNA, 122 bp, Homo sapiens
  misc_feature (61)..(62): /note="This region represents a CpG dinucleotide"
  misc_feature (61)..(61): /note="Nucleotide may be methylated to form 5-methylcytosine"
atatgaatgagcagaggccaagttgtatttggctgcatgcttgattgcgtagaaaaatgacgacactacccttggtacatctattggccccaacaggaaggagatgaaagtattgcaaaggg

SEQ ID NO: 2221 - DNA, 122 bp, Homo sapiens
  misc_feature (61)..(62): /note="This region represents a CpG dinucleotide"
  misc_feature (61)..(61): /note="Nucleotide may be methylated to form 5-methylcytosine"
aaatggcatattggtgactgcatgggtggcaaggtcttgagcacaaacaaaagaacatgtcggggaaagctctggttctacaaatagggagtgaagcagctagaggcctcgccaggaatgaa

SEQ ID NO: 2222 - DNA, 122 bp, Homo sapiens
  misc_feature (61)..(62): /note="This region represents a CpG dinucleotide"
  misc_feature (61)..(61): /note="Nucleotide may be methylated to form 5-methylcytosine"
tcatgcagctccagaatgaagccataatccaattttagaaaacgtatcatctgggccgggcgcagtggctcacacctgtaatcccagcactttgggaggcccaggtggcagatcacttgagg

SEQ ID NO: 2223 - DNA, 122 bp, Homo sapiens
  misc_feature (61)..(62): /note="This region represents a CpG dinucleotide"
  misc_feature (61)..(61): /note="Nucleotide may be methylated to form 5-methylcytosine"
tacagtgtgttgtcgtattcacactaacaccactgagaagttgatcctgttattattattcgcagcgacatttcctggcttagacctagcgtactgggtaatgcccatatgttcagaacagt

SEQ ID NO: 2224 - DNA, 122 bp, Homo sapiens
  misc_feature (61)..(62): /note="This region represents a CpG dinucleotide"
  misc_feature (61)..(61): /note="Nucleotide may be methylated to form 5-methylcytosine"
agtgtgacagccctctgtatcctgaactcttgttcagcaaccaggaaggatcagcttgcacgaacaaattgaagatggtgaatgtggagaactttattgctgatgaaaatggctctcagtgg

SEQ ID NO: 2225 - DNA, 122 bp, Homo sapiens
  misc_feature (61)..(62): /note="This region represents a CpG dinucleotide"
  misc_feature (61)..(61): /note="Nucleotide may be methylated to form 5-methylcytosine"
tctgatgatgtggccaggatgtcagctgcaaaatgaaccccaggtcattcagtgaggctgcgtctacctgtaactttgccatgtcctaaaaaggtcttgaagggcagacagatggttgatag

SEQ ID NO: 2226 - DNA, 122 bp, Homo sapiens
  misc_feature (61)..(62): /note="This region represents a CpG dinucleotide"
  misc_feature (61)..(61): /note="Nucleotide may be methylated to form 5-methylcytosine"
ctaattttgctcccagtgttctcaactcttcaagcaccgtttttacagaaaggctaatggcgtttaaaagtttattgtctcagctggggtggtggctcacgcctgtaatcccagcactttgg

SEQ ID NO: 2227 - DNA, 122 bp, Homo sapiens
  misc_feature (61)..(62): /note="This region represents a CpG dinucleotide"
  misc_feature (61)..(61): /note="Nucleotide may be methylated to form 5-methylcytosine"
ggggtatgggctttggaatcacactgtctggattcaagcctgattctgctgagtgacctgcgacaggttacctaaacacccagattccctagctgtgcagtggaggaagtggtagtatctac

SEQ ID NO: 2228 - DNA, 122 bp, Homo sapiens
  misc_feature (61)..(62): /note="This region represents a CpG dinucleotide"
  misc_feature (61)..(61): /note="Nucleotide may be methylated to form 5-methylcytosine"
gactgtgttcgtcagaccagggccagatggacgcgtgaaggcgtgtgtctgacagatgaccgggtcttttaatgaaccactcacttgaaaattgtctttctgcaggtgatgtatcacccatc

SEQ ID NO: 2229 - DNA, 122 bp, Homo sapiens
  misc_feature (61)..(62): /note="This region represents a CpG dinucleotide"
  misc_feature (61)..(61): /note="Nucleotide may be methylated to form 5-methylcytosine"
aatccctccaatgttatttaatgaacaattttaaaaaatattttagatttttgatgaatacgtaggaatatgaaaatctgaaattgtgggagagctctataaaagatggcttttatcttttt

SEQ ID NO: 2230 - DNA, 122 bp, Homo sapiens
  misc_feature (61)..(62): /note="This region represents a CpG dinucleotide"
  misc_feature (61)..(61): /note="Nucleotide may be methylated to form 5-methylcytosine"
ctgtgtagaagttgtgccaagtctaagaaaatttcaccccaggagcagtcgcttagcttccgagtccacacagcagcaacctgccccatggtttttagtttgacaccgtgttgatccttttc

SEQ ID NO: 2231 - DNA, 122 bp, Homo sapiens
  misc_feature (61)..(62): /note="This region represents a CpG dinucleotide"
  misc_feature (61)..(61): /note="Nucleotide may be methylated to form 5-methylcytosine"
ccagggcgcggtgaagaggtgacggagggctggctatgggcggctggccggggtaggggacgagggctgggttccatccaagcactgttgaagcaggaaaccccaacgactctcggcgaaga

SEQ ID NO: 2232 - DNA, 122 bp, Homo sapiens
  misc_feature (61)..(62): /note="This region represents a CpG dinucleotide"
  misc_feature (61)..(61): /note="Nucleotide may be methylated to form 5-methylcytosine"
ctccgcagaggcaacgtagattcttgtggattctttttgtttttgttttcttcgagacagcgagacgcatcttgctctgtttcccaggctggaatgcaatggcagagtagcctcgaactccc

SEQ ID NO: 2233 - DNA, 122 bp, Homo sapiens
  misc_feature (61)..(62): /note="This region represents a CpG dinucleotide"
  misc_feature (61)..(61): /note="Nucleotide may be methylated to form 5-methylcytosine"
tccaggcacccatatctatgtgggactatattgctgtaatgcagtcatgaaaatctgcggcgagggcctggactttctgaactcaataagccctctgggtaggggctaacatttctacaagg

SEQ ID NO: 2234 - DNA, 122 bp, Homo sapiens
  misc_feature (61)..(62): /note="This region represents a CpG dinucleotide"
  misc_feature (61)..(61): /note="Nucleotide may be methylated to form 5-methylcytosine"
ccagcctttagcttgtggtttaccagaaatgtagagtagccctgaaaatcgaaacaaagacgaccactcacagtagtcaatgattggaaggggtcacacgtgaaagagacttctgttgcggc

SEQ ID NO: 2235 - DNA, 122 bp, Homo sapiens
  misc_feature (61)..(62): /note="This region represents a CpG dinucleotide"
  misc_feature (61)..(61): /note="Nucleotide may be methylated to form 5-methylcytosine"
gctgtgaggggtggagccagccacctgccccacctcacccgtaccctcgctacctcatgccggaggctgcacaggtatctgggacatccagccccatgtattacacccttacctctgacctg

SEQ ID NO: 2236 - DNA, 122 bp, Homo sapiens
  misc_feature (61)..(62): /note="This region represents a CpG dinucleotide"
  misc_feature (61)..(61): /note="Nucleotide may be methylated to form 5-methylcytosine"
atctggggtcgctttgtaaggagctccgacctccgggcagtgcagggatactcgacggcgcgcgatgtcccggcggctccgcgagcctggcgcgctgagagccccagcagtccgagtcctcg

SEQ ID NO: 2237 - DNA, 122 bp, Homo sapiens
  misc_feature (61)..(62): /note="This region represents a CpG dinucleotide"
  misc_feature (61)..(61): /note="Nucleotide may be methylated to form 5-methylcytosine"
cccaacgtctggtagtagtctttacccatgaccccctcctgcggcccgccgacccgctgtcgccgtcccccggctccgccgccgaccagtcccggactctatatacccgtccggcggaagct

SEQ ID NO: 2238 - DNA, 122 bp, Homo sapiens
  misc_feature (61)..(62): /note="This region represents a CpG dinucleotide"
  misc_feature (61)..(61): /note="Nucleotide may be methylated to form 5-methylcytosine"
acacctcatcactgcaaaaagggcacaaaaaaatcacctgtgagctgtagattccggacccgtatattcctggactttggggcctggacctggggaaatcttccatttgccatctgcaggaa

SEQ ID NO: 2239 - DNA, 122 bp, Homo sapiens
  misc_feature (61)..(62): /note="This region represents a CpG dinucleotide"
  misc_feature (61)..(61): /note="Nucleotide may be methylated to form 5-methylcytosine"
gaaagtagcataaaaacaagaatgtgaactgaacatgaatgtgtagtagaaaaactacagcggggagcagttcagcttcaggaaaagtactaaagacaatcaaaggactttgccgtaattat

SEQ ID NO: 2240 - DNA, 122 bp, Homo sapiens
  misc_feature (61)..(62): /note="This region represents a CpG dinucleotide"
  misc_feature (61)..(61): /note="Nucleotide may be methylated to form 5-methylcytosine"
agtattttatagaagaacttgtaaaaccaagtggtgcatttcattagaactcaagtggcccggagaaaagaaaaagaactcatttcccatgagctcttagagccactgaaagctcagaacaa

SEQ ID NO: 2241 - DNA, 122 bp, Homo sapiens
  misc_feature (61)..(62): /note="This region represents a CpG dinucleotide"
  misc_feature (61)..(61): /note="Nucleotide may be methylated to form 5-methylcytosine"
ggaggtcaaggctgtagtcagtgtgccactgcactcccagcctgggtgagagcaagaccccgtctccaaaaaaaatcaggaccacgtgtcactaaattctgagtaccagtcaagaggctcaa

SEQ ID NO: 2242 - DNA, 122 bp, Homo sapiens
  misc_feature (61)..(62): /note="This region represents a CpG dinucleotide"
  misc_feature (61)..(61): /note="Nucleotide may be methylated to form 5-methylcytosine"
ggataacttgcttctacaagtataagaatttgttgtaagcttaccaaagttacggctgcgcgtttactgtcaacatgcatcacactgcaacaaaagccattatttagaaaataagatgaaca

SEQ ID NO: 2243 - DNA, 122 bp, Homo sapiens
  misc_feature (61)..(62): /note="This region represents a CpG dinucleotide"
  misc_feature (61)..(61): /note="Nucleotide may be methylated to form 5-methylcytosine"
tgaccagaggtcacttttatcaccatcttggtttcagtgggttttggcctgcttcttcaccgctgttttatcagcagggtctttatgacctgtatcttgcgataccagtcctgctgacctat

SEQ ID NO: 2244 - DNA, 122 bp, Homo sapiens
  misc_feature (61)..(62): /note="This region represents a CpG dinucleotide"
  misc_feature (61)..(61): /note="Nucleotide may be methylated to form 5-methylcytosine"
tcttcagcccagacttccccccaaagacattggcttggtccccagctctggacacacacacgcaactcctgctctgtggacctccacccacgtgccaacaatagaccctggatcctccctcc

SEQ ID NO: 2245 - DNA, 122 bp, Homo sapiens
  misc_feature (61)..(62): /note="This region represents a CpG dinucleotide"
  misc_feature (61)..(61): /note="Nucleotide may be methylated to form 5-methylcytosine"
aacttcctatgggaactctcaaacagaaaatatacttttttgttaagaggcagggtcttgcgctgttgcccagggtggagtacagtgacacagtcatagctcactgcagctgaaactcctgg

SEQ ID NO: 2246 - DNA, 122 bp, Homo sapiens
  misc_feature (61)..(62): /note="This region represents a CpG dinucleotide"
  misc_feature (61)..(61): /note="Nucleotide may be methylated to form 5-methylcytosine"
ctttccctagcaagcaatccttcaatgtcactttttttttttttttttgagacgggatctcgctctgtcatgcaggctggaagacagtggtacaatcacagctcactgcagccttgatctca

SEQ ID NO: 2247 - DNA, 122 bp, Homo sapiens
  misc_feature (61)..(62): /note="This region represents a CpG dinucleotide"
  misc_feature (61)..(61): /note="Nucleotide may be methylated to form 5-methylcytosine"
gcacctaggacagtgcctgtcccatagtaggtgttcagtccctatctgtgagccaacaaacgcatgatcgaaggggtattccgagcccagcaggccttgctctagaattttattatcttgaa

SEQ ID NO: 2248 - DNA, 122 bp, Homo sapiens
  misc_feature (61)..(62): /note="This region represents a CpG dinucleotide"
  misc_feature (61)..(61): /note="Nucleotide may be methylated to form 5-methylcytosine"
tcctacagagctcggactgaacaaaacttcctcctggcagcctttcctgatccacacctgcgcccggaaaagatcagcacccatcattaatgatctggtcaactgtgtggcactacctgtgc

SEQ ID NO: 2249 - DNA, 122 bp, Homo sapiens
  misc_feature (61)..(62): /note="This region represents a CpG dinucleotide"
  misc_feature (61)..(61): /note="Nucleotide may be methylated to form 5-methylcytosine"
gaattaagacagataatccccaacttagggatggtttaaaatttagggctcattttctcacggaaatgatggtataaatgttggcgaacttccctggctaggtaacacatgtctgtttagct

SEQ ID NO: 2250 - DNA, 122 bp, Homo sapiens
  misc_feature (61)..(62): /note="This region represents a CpG dinucleotide"
  misc_feature (61)..(61): /note="Nucleotide may be methylated to form 5-methylcytosine"
tcggtgaatcatatgttctgggcctgacctggatccccagtcctgacacccagcccagcacgggagctcagtgaatgaatgaatgaatgaaatgaatgaatgaaatgaatgaatgaatgaat

SEQ ID NO: 2251 - DNA, 122 bp, Homo sapiens
  misc_feature (61)..(62): /note="This region represents a CpG dinucleotide"
  misc_feature (61)..(61): /note="Nucleotide may be methylated to form 5-methylcytosine"
gtactctacgtgatgaagtttattgctgtagttaaatctaattttcatttttagtgctgtcgtatgatggtgagagacacaaaaggctaacaacactgggtcttcaggcaaaattcttctat

SEQ ID NO: 2252 - DNA, 122 bp, Homo sapiens
  misc_feature (61)..(62): /note="This region represents a CpG dinucleotide"
  misc_feature (61)..(61): /note="Nucleotide may be methylated to form 5-methylcytosine"
ttggtacatctactgattcgtgatttgaaaaatataaatatgtgtcatattttatgcagacgaggagaagaccttttcatgtgtatggacatacagctcgttgaagcactgtgtggcttcca

SEQ ID NO: 2253 - DNA, 122 bp, Homo sapiens
  misc_feature (61)..(62): /note="This region represents a CpG dinucleotide"
  misc_feature (61)..(61): /note="Nucleotide may be methylated to form 5-methylcytosine"
acccagtgctgggacagacctgtcatgaaaacacagcctatcaaacttgagcgagtggaacgcacaataaaaccactttaaacttgtccaactctctgtctgaaggagcaaggactttgaag

SEQ ID NO: 2254 - DNA, 122 bp, Homo sapiens
  misc_feature (61)..(62): /note="This region represents a CpG dinucleotide"
  misc_feature (61)..(61): /note="Nucleotide may be methylated to form 5-methylcytosine"
ctcaagtgatccacccgcctcagcctcccaaagtgctgggattacaggtgtgagccactgcgcccgtcctgactcatgcaacttctgcttcaggtaagcagatttaggctgtttattctgtg

SEQ ID NO: 2255 - DNA, 122 bp, Homo sapiens
  misc_feature (61)..(62): /note="This region represents a CpG dinucleotide"
  misc_feature (61)..(61): /note="Nucleotide may be methylated to form 5-methylcytosine"
tgtttttctgcttgtattgatgattatgaatggcagctgaatggtagagttcagagccggcgggccctggttttgctgctcattttgtcgatttctctgtaccaggtttttgaaagcgattt

SEQ ID NO: 2256 - DNA, 122 bp, Homo sapiens
  misc_feature (61)..(62): /note="This region represents a CpG dinucleotide"
  misc_feature (61)..(61): /note="Nucleotide may be methylated to form 5-methylcytosine"
acttcctctttttaaagtaaaggcgatctgaagaaagcataaatgcacaaaaatattgtacgatagtcaaaaataagagggcatagaagatggaataagctgaatgcctttctggatgcaat

SEQ ID NO: 2257 - DNA, 122 bp, Homo sapiens
  misc_feature (61)..(62): /note="This region represents a CpG dinucleotide"
  misc_feature (61)..(61): /note="Nucleotide may be methylated to form 5-methylcytosine"
gttgtgatgcttggtattcccggctgtctccagtttggggcactgtgatttgccttgtgacgtcatctctttgaggaatctgagaagacttgtttcgtcttcagtgtgtttacctttttact

SEQ ID NO: 2258 - DNA, 122 bp, Homo sapiens
  misc_feature (61)..(62): /note="This region represents a CpG dinucleotide"
  misc_feature (61)..(61): /note="Nucleotide may be methylated to form 5-methylcytosine"
gcatatgttcagactgactttgcacacttaactccactgggctttcagtgacatacttggcgcttcacctgagaacctgttatccatagatacatgagatgttaaaagtgatacatacaaaa

SEQ ID NO: 2259 - DNA, 122 bp, Homo sapiens
  misc_feature (61)..(62): /note="This region represents a CpG dinucleotide"
  misc_feature (61)..(61): /note="Nucleotide may be methylated to form 5-methylcytosine"
atgtgcattgatcactgctatctaattccagaagattttaatcactccaaagggaaaccacgtatctattagcaatcattccccatttcctccttgccctagcctctggcaactactaatct

SEQ ID NO: 2260 - DNA, 122 bp, Homo sapiens
  misc_feature (61)..(62): /note="This region represents a CpG dinucleotide"
  misc_feature (61)..(61): /note="Nucleotide may be methylated to form 5-methylcytosine"
tgtcaccagtgggggagggcctttcccagtgattgaggaccccaagtcatgcaggctttgcgtcacctgctggtatcatgtgctctcagctcatgagcagctttctaaggctgacaaactgc

SEQ ID NO: 2261 - DNA, 122 bp, Homo sapiens
  misc_feature (61)..(62): /note="This region represents a CpG dinucleotide"
  misc_feature (61)..(61): /note="Nucleotide may be methylated to form 5-methylcytosine"
aacttggccaattctgagaaaatacactgtgcttcaatatcagggccctgctcctgacctcgacagtatatggctgattttgagtcatagtaggagagtatggcctggtttgagtgttttat

SEQ ID NO: 2262 - DNA, 122 bp, Homo sapiens
  misc_feature (61)..(62): /note="This region represents a CpG dinucleotide"
  misc_feature (61)..(61): /note="Nucleotide may be methylated to form 5-methylcytosine"
aggttcaagcgacacttatatgtcagcctctcgagtagctgggactacaggtgcatgccacgatgcctggctaattttttggtatttttttggtagagacgaggtctcagcatgttggccag

SEQ ID NO: 2263 - DNA, 122 bp, Homo sapiens
  misc_feature (61)..(62): /note="This region represents a CpG dinucleotide"
  misc_feature (61)..(61): /note="Nucleotide may be methylated to form 5-methylcytosine"
agaggagaatgatgctgagattaaagcctctcccctggagtgattctatgtggcctgttgcgttggtgcagagaggcaaggcaataaggccttctggggttcagcagagagacaggtcaaac

SEQ ID NO: 2264 - DNA, 122 bp, Homo sapiens
  misc_feature (61)..(62): /note="This region represents a CpG dinucleotide"
  misc_feature (61)..(61): /note="Nucleotide may be methylated to form 5-methylcytosine"
cttgaaacattgtttatgcataaataaattcaccactctgaaaagtattctgacaaggcacggcatgtgttggcatctgcaagtcagcctgtactgagttttcactacccacaagaggtggt

SEQ ID NO: 2265 - DNA, 122 bp, Homo sapiens
  misc_feature (61)..(62): /note="This region represents a CpG dinucleotide"
  misc_feature (61)..(61): /note="Nucleotide may be methylated to form 5-methylcytosine"
gacaagcctgggcgacatagtgagacaccatctctacaaaaaccaaaaaaatcagccaggcgtggtagcccatgcctgtagtctaatctactcgggaggctgaggtgggaggatcacttgag

SEQ ID NO: 2266 - DNA, 122 bp, Homo sapiens
  misc_feature (61)..(62): /note="This region represents a CpG dinucleotide"
  misc_feature (61)..(61): /note="Nucleotide may be methylated to form 5-methylcytosine"
acttttcataatggttgcatcccagctctaaaatttgtttatttcttctttcacatactccgtcttttcagaaaggatttgatagagatgacacatttgttattgttcctaagctctggctt

SEQ ID NO: 2267 - DNA, 122 bp, Homo sapiens
  misc_feature (61)..(62): /note="This region represents a CpG dinucleotide"
  misc_feature (61)..(61): /note="Nucleotide may be methylated to form 5-methylcytosine"
accagaaatttgagagcagtgatcagcaaaagtgaatagacattatttcacttggttttgcgttggcccttgcattatcgatttgcatagcaggtgtctgattaaatttctcagcctgtatg

SEQ ID NO: 2268 - DNA, 122 bp, Homo sapiens
  misc_feature (61)..(62): /note="This region represents a CpG dinucleotide"
  misc_feature (61)..(61): /note="Nucleotide may be methylated to form 5-methylcytosine"
cgtgctggtcgccggcgttgccagtcttgagccgcttaggggcaccgccgccctcactgccgccgccttagtagccgccaccgccgcctctgccgccccccgccgccatcttcatcgctccc

SEQ ID NO: 2269 - DNA, 122 bp, Homo sapiens
  misc_feature (61)..(62): /note="This region represents a CpG dinucleotide"
  misc_feature (61)..(61): /note="Nucleotide may be methylated to form 5-methylcytosine"
tagctgggaccacaggcatgtgccaccatgcctgcataattttttttagagatgaggtctcgctctgttgcccaggctggtttgtaactcctgagctcaagcaatgcacctgcctcagcctc

SEQ ID NO: 2270 - DNA, 122 bp, Homo sapiens
  misc_feature (61)..(62): /note="This region represents a CpG dinucleotide"
  misc_feature (61)..(61): /note="Nucleotide may be methylated to form 5-methylcytosine"
tggatgcacccactggaatttttctttaacaaacagacccgcggaacttgttagagagcccggcgaagagttggctgctctccccgtccacacatacgataccagagccaggggcgagggct

SEQ ID NO: 2271 - DNA, 122 bp, Homo sapiens
  misc_feature (61)..(62): /note="This region represents a CpG dinucleotide"
  misc_feature (61)..(61): /note="Nucleotide may be methylated to form 5-methylcytosine"
ttgtaggaggttgccccccaatatctatttgaccttcttgcaggatagtagaatatttgacgggatgcatgaccacttagctaaagtcagcatttcccaatccgtcttgcagcagcagggct

SEQ ID NO: 2272 - DNA, 122 bp, Homo sapiens
  misc_feature (61)..(62): /note="This region represents a CpG dinucleotide"
  misc_feature (61)..(61): /note="Nucleotide may be methylated to form 5-methylcytosine"
tgcaccagtctgaagcctgacgcaagcaaaatctcgaaaaaacaatgctagctttcaaagcgttgaggtgcaggcctgcagacggacggacggaccgaccgacactactttgggagtaggaa

SEQ ID NO: 2273 - DNA, 122 bp, Homo sapiens
  misc_feature (61)..(62): /note="This region represents a CpG dinucleotide"
  misc_feature (61)..(61): /note="Nucleotide may be methylated to form 5-methylcytosine"
accttgctaagaggagaggtctctctctctctctctctctatctctctccttgcaacctccggctccccccaaaaaaaacagcagaaatacccaggcaagagagagttgctgtcctttaaaa

SEQ ID NO: 2274 - DNA, 122 bp, Homo sapiens
  misc_feature (61)..(62): /note="This region represents a CpG dinucleotide"
  misc_feature (61)..(61): /note="Nucleotide may be methylated to form 5-methylcytosine"
tttgaaattttagattttgtcctcttttacattacagtcaccaaagagccattcagtgaccgtaacataaaagatggtgggctatagtttttcttttaaggaaatggctctcttaaatttag

SEQ ID NO: 2275 - DNA, 122 bp, Homo sapiens
  misc_feature (61)..(62): /note="This region represents a CpG dinucleotide"
  misc_feature (61)..(61): /note="Nucleotide may be methylated to form 5-methylcytosine"
gagtgagtcaggcgatggtgagcctccgtgccagaacaacttgtaggctgtggaagcaaccgcaaagggatggcagcggtgatatatatagttgaaagatcactgtctgctgtgtagaggat

SEQ ID NO: 2276 - DNA, 122 bp, Homo sapiens
  misc_feature (61)..(62): /note="This region represents a CpG dinucleotide"
  misc_feature (61)..(61): /note="Nucleotide may be methylated to form 5-methylcytosine"
caagcaactagattagggggtcatgaatcactttcccaaaagcttccctgccagttcctccgaaaggcactttgacttacaaaaacatgttagaaaggcatcgaagccatcaagaaagacac

SEQ ID NO: 2277 - DNA, 122 bp, Homo sapiens
  misc_feature (61)..(62): /note="This region represents a CpG dinucleotide"
  misc_feature (61)..(61): /note="Nucleotide may be methylated to form 5-methylcytosine"
accctcatagagtccattgcaccccgccactacctccactggaaaaggcattggtatccacggctgagagatccatcgatgactcacatcacaggactctgtccagacaacccccagtatga

SEQ ID NO: 2278 - DNA, 122 bp, Homo sapiens
  misc_feature (61)..(62): /note="This region represents a CpG dinucleotide"
  misc_feature (61)..(61): /note="Nucleotide may be methylated to form 5-methylcytosine"
cgacctatttatcctttctgtggcttgagcatcattccctggacaaatcaatggcagctacgctagcagggtttattttctcacagcactcatggcatgagtcagagctgctttgtacataa

SEQ ID NO: 2279 - DNA, 122 bp, Homo sapiens
  misc_feature (61)..(62): /note="This region represents a CpG dinucleotide"
  misc_feature (61)..(61): /note="Nucleotide may be methylated to form 5-methylcytosine"
cctatgtctttccatgtgtgatttgcgactgaaaactttctcacattcttcacatttgtacggtttctctgcagtatgaagtttatgatgacatgcaaggtttgcttttgtactaaaaacct

SEQ ID NO: 2280 - DNA, 122 bp, Homo sapiens
  misc_feature (61)..(62): /note="This region represents a CpG dinucleotide"
  misc_feature (61)..(61): /note="Nucleotide may be methylated to form 5-methylcytosine"
gaaggaaagcatggaaaacaaatagcagctttctcttagaatgcaaagaacagaagctgccgacacctgaaaataaaagctatgccctgtgctttgaggaagaccagagtcagctctgaatc

SEQ ID NO: 2281 - DNA, 122 bp, Homo sapiens
  misc_feature (61)..(62): /note="This region represents a CpG dinucleotide"
  misc_feature (61)..(61): /note="Nucleotide may be methylated to form 5-methylcytosine"
aaagggaggggcattcttacacccggctctaatgtgggctctgtgtggtcttggacaatgcgcatgccccccaccatccaaacaccccagtttcctcatctgtaatgaagagaggaatcctg

SEQ ID NO: 2282 - DNA, 122 bp, Homo sapiens
  misc_feature (61)..(62): /note="This region represents a CpG dinucleotide"
  misc_feature (61)..(61): /note="Nucleotide may be methylated to form 5-methylcytosine"
ctccgaaaaggtaagtcgattcccagtactcaccctgatccatctccctccttctcctgtcggtcaaggcccttcaactagtcaccagtacgattcgagacctaattgcctcttgagcattt

SEQ ID NO: 2283 - DNA, 122 bp, Homo sapiens
  misc_feature (61)..(62): /note="This region represents a CpG dinucleotide"
  misc_feature (61)..(61): /note="Nucleotide may be methylated to form 5-methylcytosine"
ctccatcacccattccgactacccgccctacgctccacctcttgacccgtcatcaccgaccggggggcgggactgcccgacttttcaatcgctgcctaccattggtagaactctccatccgt

SEQ ID NO: 2284 - DNA, 122 bp, Homo sapiens
  misc_feature (61)..(62): /note="This region represents a CpG dinucleotide"
  misc_feature (61)..(61): /note="Nucleotide may be methylated to form 5-methylcytosine"
tgacctcgtgatccacctgcctcggcctctcaaagtgctgggattacaggcgtgagccaccgcgcccggcctaatttttaaataaatagagacgggggttgggtgtcactatttgcccaggc

SEQ ID NO: 2285 - DNA, 122 bp, Homo sapiens
  misc_feature (61)..(62): /note="This region represents a CpG dinucleotide"
  misc_feature (61)..(61): /note="Nucleotide may be methylated to form 5-methylcytosine"
tccacctccattccacattttgatgcctgctaggttgagaatgactgttgtaatgagtaacgattaatgaagggaatggattctatccctcataaatgttacagagtaaagatagttgagaa

SEQ ID NO: 2286 - DNA, 122 bp, Homo sapiens
  misc_feature (61)..(62): /note="This region represents a CpG dinucleotide"
  misc_feature (61)..(61): /note="Nucleotide may be methylated to form 5-methylcytosine"
cagaaaggctttgtgccagtcattctctatttggtctcagatccgatccctgctcttctgcgttgctttgcaccacaagatgctggcccctgcaaactacatttccgtggctgccctgccaa

SEQ ID NO: 2287 - DNA, 122 bp, Homo sapiens
  misc_feature (61)..(62): /note="This region represents a CpG dinucleotide"
  misc_feature (61)..(61): /note="Nucleotide may be methylated to form 5-methylcytosine"
taaaagcagaatcaagtaacagttggctttcataaccaaatacagtcatatgctggataacgatgttttggtcaatgatgtaccgcatatacaatggtggtcccagaagattataaaaccat

SEQ ID NO: 2288 - DNA, 122 bp, Homo sapiens
  misc_feature (61)..(62): /note="This region represents a CpG dinucleotide"
  misc_feature (61)..(61): /note="Nucleotide may be methylated to form 5-methylcytosine"
accaccctgtttcatagaagatatctcaggtaatgtgcaaacacgggtttttaaacggagcgcatttttctcatttgttaatatcaccacctaaatcatctcttgcctaaaacaaggagtag

SEQ ID NO: 2289 - DNA, 122 bp, Homo sapiens
  misc_feature (61)..(62): /note="This region represents a CpG dinucleotide"
  misc_feature (61)..(61): /note="Nucleotide may be methylated to form 5-methylcytosine"
cactaattcttccccagtgccctttttctgttctaggatccagtccaggatactatactgcgtttaattgtcatgtctccttagtttacttgagtctgtgacaatttctcaatctttccttt

SEQ ID NO: 2290 - DNA, 122 bp, Homo sapiens
  misc_feature (61)..(62): /note="This region represents a CpG dinucleotide"
  misc_feature (61)..(61): /note="Nucleotide may be methylated to form 5-methylcytosine"
atataatagttctctaggactgccacagcaaatcaccatgaactgggtagcttaacacaacgaatttattctctcacagttctggaggccggaagtctgaaatcaaggtctcggcagggttg

SEQ ID NO: 2291 - DNA, 122 bp, Homo sapiens
  misc_feature (61)..(62): /note="This region represents a CpG dinucleotide"
  misc_feature (61)..(61): /note="Nucleotide may be methylated to form 5-methylcytosine"
tccagagatcaggagcaagatccggagtgaggatcagagccaagcctggggtcatagaggcgcaaacccactagtgcagcaaagtagaaaccaacagagaaggtcagttcacaagttggttt

SEQ ID NO: 2292 - DNA, 122 bp, Homo sapiens
  misc_feature (61)..(62): /note="This region represents a CpG dinucleotide"
  misc_feature (61)..(61): /note="Nucleotide may be methylated to form 5-methylcytosine"
atacctaccagtttgtggttctgactacatcacctatgggaatgaatgtcacttgtgtaccgagagcttgtgagtacctcataagaagaaaatgagatctggagtcagtgctctctactaca

SEQ ID NO: 2293 - DNA, 122 bp, Homo sapiens
  misc_feature (61)..(62): /note="This region represents a CpG dinucleotide"
  misc_feature (61)..(61): /note="Nucleotide may be methylated to form 5-methylcytosine"
ggctgggtgtgtgtgccgcctctgtgtgagcatgtgctagtcacacagctgggatatggccgtgttttggttccagctctttgggctagagccacgccgcagtagtgatagctccatttggg

SEQ ID NO: 2294 - DNA, 122 bp, Homo sapiens
  misc_feature (61)..(62): /note="This region represents a CpG dinucleotide"
  misc_feature (61)..(61): /note="Nucleotide may be methylated to form 5-methylcytosine"
tccgggtgaccgcggcttcccgggagcagacctctgtgggcactgtgaggcggaacggagcggcggggcaggagctgttctgggcaggtgaaggcaggctggtggctgaaggacctccttct

SEQ ID NO: 2295 - DNA, 122 bp, Homo sapiens
  misc_feature (61)..(62): /note="This region represents a CpG dinucleotide"
  misc_feature (61)..(61): /note="Nucleotide may be methylated to form 5-methylcytosine"
tggagcttttgcgagggatttataggtcagatagctcagcagtttgagcttgttgcccaccgtaccttaacaaagcttgtgcgtgtttgtacagctggactggtagctgtgggagtcccgag

SEQ ID NO: 2296 - DNA, 122 bp, Homo sapiens
  misc_feature (61)..(62): /note="This region represents a CpG dinucleotide"
  misc_feature (61)..(61): /note="Nucleotide may be methylated to form 5-methylcytosine"
ctctttgcctgaataaataatgcacagattcttcgggacaggctgcttcctccaggccgccgcttccaagggatccggtcgctttgtgggtttagtggtggcccacagctggacgcggggtc

SEQ ID NO: 2297 - DNA, 122 bp, Homo sapiens
  misc_feature (61)..(62): /note="This region represents a CpG dinucleotide"
  misc_feature (61)..(61): /note="Nucleotide may be methylated to form 5-methylcytosine"
aaactctgtctcaaaaagaaaaagaaaagaaaaaagaaaaagtttattcccagtaaaacacgttcaactctccagatcgtggtgacatttccagcttgatgtggtaacgtgattgtgagctt

SEQ ID NO: 2298 - DNA, 122 bp, Homo sapiens
  misc_feature (61)..(62): /note="This region represents a CpG dinucleotide"
  misc_feature (61)..(61): /note="Nucleotide may be methylated to form 5-methylcytosine"
tcttggcaccagtctaagcagcacttcaccctccctcctcaggagctggagtatcagaggcgccaggtacgggagcccagtgacaagtttgtccctgtcatgagcgacttcatcacggtgtc

SEQ ID NO: 2299 - DNA, 122 bp, Homo sapiens
  misc_feature (61)..(62): /note="This region represents a CpG dinucleotide"
  misc_feature (61)..(61): /note="Nucleotide may be methylated to form 5-methylcytosine"
gaaacttgaacagcaacaggaaatcagaaactttatttccatttcttcttttcttctgtccgttgcttcctcttggattttcccaaccctcaatacgtctgtggtctttctctcgtcttgat

SEQ ID NO: 2300 - DNA, 122 bp, Homo sapiens
  misc_feature (61)..(62): /note="This region represents a CpG dinucleotide"
  misc_feature (61)..(61): /note="Nucleotide may be methylated to form 5-methylcytosine"
tctaatacagaaagctctttagagatcatccatcagagtagaaccttagtcatagaaactcgctcagaacataccaatctaaataaccaaactttccaagtgccaataaagatatatcaaat

SEQ ID NO: 2301 - DNA, 122 bp, Homo sapiens
  misc_feature (61)..(62): /note="This region represents a CpG dinucleotide"
  misc_feature (61)..(61): /note="Nucleotide may be methylated to form 5-methylcytosine"
tcagtccatttcctcacttatgaaactttcttagtccctaatttaggcatctgagtttgccgtctctggcctatatgatcatagactgtcagtagtggaagagatattaaaagatcaactcg

SEQ ID NO: 2302 - DNA, 122 bp, Homo sapiens
  misc_feature (61)..(62): /note="This region represents a CpG dinucleotide"
  misc_feature (61)..(61): /note="Nucleotide may be methylated to form 5-methylcytosine"
ttccaaatccctttcatgtctttccacttctctgggtcccggggtgcatttgttactcatcgggcccagggacattgcagagtggcctagagcactctcaccccaagcggccttttccaaat

SEQ ID NO: 2303 - DNA, 122 bp, Homo sapiens
  misc_feature (61)..(62): /note="This region represents a CpG dinucleotide"
  misc_feature (61)..(61): /note="Nucleotide may be methylated to form 5-methylcytosine"
accccagcgcccgaccctttccccttcatctccagcatgaatccctcaacccgctggctgcggagatcacagacacttcagaaggtgatgagagtcaaggactccctcccacccccaccgca

SEQ ID NO: 2304 - DNA, 122 bp, Homo sapiens
  misc_feature (61)..(62): /note="This region represents a CpG dinucleotide"
  misc_feature (61)..(61): /note="Nucleotide may be methylated to form 5-methylcytosine"
tgtcagaggaatatatggtaaaaatggtatactgttagtcattactcttcatcacctgaacgattaatcttactaggccccccagaggtcaggagaagtgaaataagatggaaatagtcaaa

SEQ ID NO: 2305 - DNA, 122 bp, Homo sapiens
  misc_feature (61)..(62): /note="This region represents a CpG dinucleotide"
  misc_feature (61)..(61): /note="Nucleotide may be methylated to form 5-methylcytosine"
taagtgttcatttttaggaaatacagcctaagtccttgcagtgaacaatccaagccaattcggtaatttgtacatgttaaaatatttttagtagttattggcatcctccaacatttagcagt

SEQ ID NO: 2306 - DNA, 122 bp, Homo sapiens
  misc_feature (61)..(62): /note="This region represents a CpG dinucleotide"
  misc_feature (61)..(61): /note="Nucleotide may be methylated to form 5-methylcytosine"
tggggcagcctcagcgcagcttctcgggtggggcggggcgctcggggcctaaggcgcagtcgcaggctggggagggggctcggctcgccggggacgcgcccaggagagaaagcggcggcagg

SEQ ID NO: 2307 - DNA, 122 bp, Homo sapiens
  misc_feature (61)..(62): /note="This region represents a CpG dinucleotide"
  misc_feature (61)..(61): /note="Nucleotide may be methylated to form 5-methylcytosine"
tgatctcatagtatcttgttatgactgttcctatgacaagaccattgcccagaacagctccgcatgaatgtgatagtctttggagaacattatatagtgtctttacatattttactctgtag

SEQ ID NO: 2308 - DNA, 122 bp, Homo sapiens
  misc_feature (61)..(62): /note="This region represents a CpG dinucleotide"
  misc_feature (61)..(61): /note="Nucleotide may be methylated to form 5-methylcytosine"
tctcgtccctcgtgcagcccggagagcgcgaagcgggcacacgcgctctatttataggagcgcagcgtccggctgggttggcttatcgcgcaacccgcgggctccgagaaaagggggagaag

SEQ ID NO: 2309 - DNA, 122 bp, Homo sapiens
  misc_feature (61)..(62): /note="This region represents a CpG dinucleotide"
  misc_feature (61)..(61): /note="Nucleotide may be methylated to form 5-methylcytosine"
atcaaccagaagctactcagtcctcaaatcggatccagtacatgcagaactgagtccaaacgagacggacagcaaacccggcagtggctcccagacattcctgggggaaaggaatcctaacc

SEQ ID NO: 2310 - DNA, 122 bp, Homo sapiens
  misc_feature (61)..(62): /note="This region represents a CpG dinucleotide"
  misc_feature (61)..(61): /note="Nucleotide may be methylated to form 5-methylcytosine"
aataaatgcggtgtctcaaatgacttaaacaattgcagagtgccacccacagagatcatgcggaagtgaaagatgacactttcaatgttctgttctggaagaacagacaggtcttcaaagca

SEQ ID NO: 2311 - DNA, 122 bp, Homo sapiens
  misc_feature (61)..(62): /note="This region represents a CpG dinucleotide"
  misc_feature (61)..(61): /note="Nucleotide may be methylated to form 5-methylcytosine"
tgttaacttgtacaaggtctcactactagggtacatcttcagatcagacacactaagtaacgtgccagaaataaattcctcccatttaaagcatgtatgcgtgtggacagtaacacgtgaaa

SEQ ID NO: 2312 - DNA, 122 bp, Homo sapiens
  misc_feature (61)..(62): /note="This region represents a CpG dinucleotide"
  misc_feature (61)..(61): /note="Nucleotide may be methylated to form 5-methylcytosine"
tataaatagagaaaaaatattgcaaaagaacactcgctcctgcctaccactgaatacctgcggtgcaggatagggagattagtctttaacatactcagaagagaagactagaggacataaat

SEQ ID NO: 2313 - DNA, 122 bp, Homo sapiens
  misc_feature (61)..(62): /note="This region represents a CpG dinucleotide"
  misc_feature (61)..(61): /note="Nucleotide may be methylated to form 5-methylcytosine"
cttgcaaaccgtgttgtatctgtgtctttacttactatggttgagaggaaaggatttacacgctgcgtttgcaacctgcaaagtaatgagccgtgttgtagtaacattttgagatattgtat

SEQ ID NO: 2314 - DNA, 122 bp, Homo sapiens
  misc_feature (61)..(62): /note="This region represents a CpG dinucleotide"
  misc_feature (61)..(61): /note="Nucleotide may be methylated to form 5-methylcytosine"
cctagttcataggtggtacattcttgctgtgtcctcacatgatggaagaactaactagctcgctgcggcctcttttataaaggcactaatcccattcaggagagttccccttcatgacctaa

SEQ ID NO: 2315 - DNA, 122 bp, Homo sapiens
  misc_feature (61)..(62): /note="This region represents a CpG dinucleotide"
  misc_feature (61)..(61): /note="Nucleotide may be methylated to form 5-methylcytosine"
tgcagagctgaactaagacattacaatatatctagatgcttccaccaaaactgaaaaagccgcaaagggaggagaacttgaagtttgattatgttaaacagagggggtagctctgcttatgg

SEQ ID NO: 2316 - DNA, 122 bp, Homo sapiens
  misc_feature (61)..(62): /note="This region represents a CpG dinucleotide"
  misc_feature (61)..(61): /note="Nucleotide may be methylated to form 5-methylcytosine"
gggggcacatggcttccacaggactattgactggtgatgctagccctgagtgcttggttacgttagtttttgccagattttcccactatgaagttgtcatttttccctttccatattttgtt

SEQ ID NO: 2317 - DNA, 122 bp, Homo sapiens
  misc_feature (61)..(62): /note="This region represents a CpG dinucleotide"
  misc_feature (61)..(61): /note="Nucleotide may be methylated to form 5-methylcytosine"
gctaactcttgagtataaaaatgtgttcagtgttgaggatcccaatatgagtaatatgtacgccctgtcatcatgatgggaactgacaattgaatagaagaggataagaaacagacaagaaa

SEQ ID NO: 2318 - DNA, 122 bp, Homo sapiens
  misc_feature (61)..(62): /note="This region represents a CpG dinucleotide"
  misc_feature (61)..(61): /note="Nucleotide may be methylated to form 5-methylcytosine"
taatctggtcatagatattaagcttgtcaactctcctgttttatctgctggcctctgtgacgcagccatcgctccctctcttcaaccctctcttgattgaaggttagctaccttgagattat

SEQ ID NO: 2319 - DNA, 122 bp, Homo sapiens
  misc_feature (61)..(62): /note="This region represents a CpG dinucleotide"
  misc_feature (61)..(61): /note="Nucleotide may be methylated to form 5-methylcytosine"
aatcctaataattggatgtcacttaagaacctacaaaacatacactcaatgaacaatacacggccattaaaaagtgatagataggctgctctgtctatggagtagccattctttcatttgtt

SEQ ID NO: 2320 - DNA, 122 bp, Homo sapiens
  misc_feature (61)..(62): /note="This region represents a CpG dinucleotide"
  misc_feature (61)..(61): /note="Nucleotide may be methylated to form 5-methylcytosine"
ccgcgccaggccgcccgcacacccagagctcgcccacggttggcagcgcccaaggttgcacggcatggcccgcttaagtgccactcagccctaatgtttttatttatgaagtaacttaactt

SEQ ID NO: 2321 - DNA, 122 bp, Homo sapiens
  misc_feature (61)..(62): /note="This region represents a CpG dinucleotide"
  misc_feature (61)..(61): /note="Nucleotide may be methylated to form 5-methylcytosine"
aggagaattgcttgaacccaggaggcagaggttgcagtaagctgagattgcgccactgcacgccagcctggtgacagaacgagactccatctcaaaaaaagaaagaaagaaaaagaaaagaa

SEQ ID NO: 2322 - DNA, 122 bp, Homo sapiens
  misc_feature (61)..(62): /note="This region represents a CpG dinucleotide"
  misc_feature (61)..(61): /note="Nucleotide may be methylated to form 5-methylcytosine"
aattagaaaacaaaaatcaaacactcatatttcagtgagaggtcacaaaatatgtatccccgagtcttctagtttctcccagtaaaaaaagctcctccctttgaaggcccgcactagcttat

SEQ ID NO: 2323 - DNA, 122 bp, Homo sapiens
  misc_feature (61)..(62): /note="This region represents a CpG dinucleotide"
  misc_feature (61)..(61): /note="Nucleotide may be methylated to form 5-methylcytosine"
ggacgtctccccggacccatcgctgtccaccccaggctcggccggctcggcccggcaggacgagaaagagtgcctcaagtaccaggtgcccctgcccgacagcatgaagctggagtcgtccc

SEQ ID NO: 2324 - DNA, 122 bp, Homo sapiens
  misc_feature (61)..(62): /note="This region represents a CpG dinucleotide"
  misc_feature (61)..(61): /note="Nucleotide may be methylated to form 5-methylcytosine"
tgcttgtgcctacaagaatacatgctgtacgattccctttggatccagcacaagaaaaggcgtaactaatctacacccttcgaagccgggacagggaagagaaagaggaggcaggcaggaag

SEQ ID NO: 2325 - DNA, 122 bp, Homo sapiens
  misc_feature (61)..(62): /note="This region represents a CpG dinucleotide"
  misc_feature (61)..(61): /note="Nucleotide may be methylated to form 5-methylcytosine"
tttctatgaagatgtctaatgtttaattttccaaagttctacgtaatccacaaggagagacgtaataaaatggatatgatttaacaggagcggcttcatgattcctccctgaaaatacctgg

SEQ ID NO: 2326 - DNA, 122 bp, Homo sapiens
  misc_feature (61)..(62): /note="This region represents a CpG dinucleotide"
  misc_feature (61)..(61): /note="Nucleotide may be methylated to form 5-methylcytosine"
atgcatggactatgcacacaaatctatgtacacacaaatcggcctgcacttgccgctctccgctgaggaaggaaggtagctttggagtcagaactaacagaaagttatgtatgatcttggac

SEQ ID NO: 2327 - DNA, 122 bp, Homo sapiens
  misc_feature (61)..(62): /note="This region represents a CpG dinucleotide"
  misc_feature (61)..(61): /note="Nucleotide may be methylated to form 5-methylcytosine"
ccttgagaagagtctgattttcagcaccttgatcaatgtgtgacacatacatgcttcatgcgcagagaaggaaatgatttcactacagtgtaattattctcagaattcaatacctgtatttc

SEQ ID NO: 2328 - DNA, 122 bp, Homo sapiens
  misc_feature (61)..(62): /note="This region represents a CpG dinucleotide"
  misc_feature (61)..(61): /note="Nucleotide may be methylated to form 5-methylcytosine"
aaggcctttgggatatcaactccctggtgacccaggtctgatcagaattgaattttactccgcttagaacaagtttttgtgttttttttttttaaggattatggtaaatgaagcctttgagt

SEQ ID NO: 2329 - DNA, 122 bp, Homo sapiens
  misc_feature (61)..(62): /note="This region represents a CpG dinucleotide"
  misc_feature (61)..(61): /note="Nucleotide may be methylated to form 5-methylcytosine"
tgctgtgctggggagtgtcataaagtcctcgttagctgaaaggcactcaggggttctgaccgtacccctgcatcctctgcagagcttccttgggtcttcctgactctgcagaagttactcag

SEQ ID NO: 2330 - DNA, 122 bp, Homo sapiens
  misc_feature (61)..(62): /note="This region represents a CpG dinucleotide"
  misc_feature (61)..(61): /note="Nucleotide may be methylated to form 5-methylcytosine"
tgtctcaaaaaaaaaaaaaaaagaaattgtatttccttttgttcctaagcagatagctaccgataaaaggttaaatctctctgtaggtagctactctgtgttcaccttttatgtaaagtgct

SEQ ID NO: 2331 - DNA, 122 bp, Homo sapiens
  misc_feature (61)..(62): /note="This region represents a CpG dinucleotide"
  misc_feature (61)..(61): /note="Nucleotide may be methylated to form 5-methylcytosine"
ggctgcggagctcgtggatgccgtgtgcgaactggcacttgtccccgtacttacaggcaccgttttcctcaaaggggcggcacagctccgtcttgtagcggctggagttgacctggccgccc

SEQ ID NO: 2332 - DNA, 122 bp, Homo sapiens
  misc_feature (61)..(62): /note="This region represents a CpG dinucleotide"
  misc_feature (61)..(61): /note="Nucleotide may be methylated to form 5-methylcytosine"
acagagcaagactccatctcaaaaaaaaaaaaaaaaaaagaagaagaagaaaataacaagcgttgacaaggatgtgaataaattagaacccttgtgcactgcaggaatgtaaactggtacag

SEQ ID NO: 2333 - DNA, 122 bp, Homo sapiens
  misc_feature (61)..(62): /note="This region represents a CpG dinucleotide"
  misc_feature (61)..(61): /note="Nucleotide may be methylated to form 5-methylcytosine"
ggcaacatggcgaagtcccatctctacaaaaacacaacaaattagccaggcatggtggtgcgtgcctgtaatcccagctaccatggatgctgaggtgggagaacatttgaacccacgacctc

SEQ ID NO: 2334 - DNA, 122 bp, Homo sapiens
  misc_feature (61)..(62): /note="This region represents a CpG dinucleotide"
  misc_feature (61)..(61): /note="Nucleotide may be methylated to form 5-methylcytosine"
agccccatatatagtctaagaaatattacaacaatcaaagaatatagcttgaagctaaaacgggttcttgaaatcttcccttggtgtttcttatgtttactgctattgatgaaattcaactg

SEQ ID NO: 2335 - DNA, 122 bp, Homo sapiens
  misc_feature (61)..(62): /note="This region represents a CpG dinucleotide"
  misc_feature (61)..(61): /note="Nucleotide may be methylated to form 5-methylcytosine"
agaaatgtagaaatattatagttacttttggggttttatctcagctctttactcattgtgcgatcttgggctagttatttaagtttctgagtttcagtgtctttatctgtaaaatggggaaa

SEQ ID NO: 2336 - DNA, 122 bp, Homo sapiens
  misc_feature (61)..(62): /note="This region represents a CpG dinucleotide"
  misc_feature (61)..(61): /note="Nucleotide may be methylated to form 5-methylcytosine"
atcttctttactctgtctactgattcaaatgtcagtctcttgtggaatcaccctcacagacgtaaccagaagtaatggtttatcagctatctaggtattccttaatccagtcaaattgacct

SEQ ID NO: 2337 - DNA, 122 bp, Homo sapiens
  misc_feature (61)..(62): /note="This region represents a CpG dinucleotide"
  misc_feature (61)..(61): /note="Nucleotide may be methylated to form 5-methylcytosine"
gcttgaaccaggatgtagggctggctgttggcttccaaaaccctcactttttctactctgcgcattgctgcatcccgatctgtcactaatgagaatctgaggacagcaaatcagttaggagg

SEQ ID NO: 2338 - DNA, 122 bp, Homo sapiens
  misc_feature (61)..(62): /note="This region represents a CpG dinucleotide"
  misc_feature (61)..(61): /note="Nucleotide may be methylated to form 5-methylcytosine"
cctaatccccagttacactggctttctgggagattccagaatgtcaggtgcccattcccccgatgggcctttgcaccgacccatccctgaacctggaccatgtgtctccctgctcttcaacg

SEQ ID NO: 2339 - DNA, 122 bp, Homo sapiens
  misc_feature (61)..(62): /note="This region represents a CpG dinucleotide"
  misc_feature (61)..(61): /note="Nucleotide may be methylated to form 5-methylcytosine"
atacaaaaaaaaaaaaaaattagctgggtgtcgtggcgcacacctgtaatcccagctactcggaaggctgagacacaagaatcacttaaacccagaaggaggaggttgcagtgagctgagat

SEQ ID NO: 2340 - DNA, 122 bp, Homo sapiens
  misc_feature (61)..(62): /note="This region represents a CpG dinucleotide"
  misc_feature (61)..(61): /note="Nucleotide may be methylated to form 5-methylcytosine"
acatacgaactttgattttactgaaagggaattaggttcagaggttaatcaggtgactcacggtcacttttggggcagaatttgggacttaatttaactcagtgctgaattgtagtttatga

SEQ ID NO: 2341 - DNA, 122 bp, Homo sapiens
  misc_feature (61)..(62): /note="This region represents a CpG dinucleotide"
  misc_feature (61)..(61): /note="Nucleotide may be methylated to form 5-methylcytosine"
tcagaccaagaacacttcagtctctctaaggatgccctgagctacctcactgttaaaggacgacatcaacacagaatgcactaaacaggaaataagctgtaatctagagaatttccattatg

SEQ ID NO: 2342 - DNA, 122 bp, Homo sapiens
  misc_feature (61)..(62): /note="This region represents a CpG dinucleotide"
  misc_feature (61)..(61): /note="Nucleotide may be methylated to form 5-methylcytosine"
tcaatagttataataccaaaatttctccttttcaaaatccttaaatatttttattcttcacgaaaagatgagaagataatttttaaactttgtcatagtttagcttataaaaatttatactc

SEQ ID NO: 2343 - DNA, 122 bp, Homo sapiens
  misc_feature (61)..(62): /note="This region represents a CpG dinucleotide"
  misc_feature (61)..(61): /note="Nucleotide may be methylated to form 5-methylcytosine"
agctactgcctgtctttttcttctgcgtatcactgtcctagcacactgacttgtgactaacgcatagcaagaccagaggtttccaattatttcaaagatctagaaaaagtttccaaagaaaa

SEQ ID NO: 2344 - DNA, 122 bp, Homo sapiens
  misc_feature (61)..(62): /note="This region represents a CpG dinucleotide"
  misc_feature (61)..(61): /note="Nucleotide may be methylated to form 5-methylcytosine"
tgaaggcacatcaatactgaagaggatgaaccccatccttacctacgaatccaacttctgcggccagaacatgtggctttgcctttgttaaagagctgagcagaatcccacaaccagtggct

SEQ ID NO: 2345 - DNA, 122 bp, Homo sapiens
  misc_feature (61)..(62): /note="This region represents a CpG dinucleotide"
  misc_feature (61)..(61): /note="Nucleotide may be methylated to form 5-methylcytosine"
gaggagatctggatacagatacacacagagagaagatgataaggagacccaggaggaaggcggccatctacaagccaaggagagagaatgcagaagaaaccaatcctgtcaacaccttcaac

SEQ ID NO: 2346 - DNA, 122 bp, Homo sapiens
  misc_feature (61)..(62): /note="This region represents a CpG dinucleotide"
  misc_feature (61)..(61): /note="Nucleotide may be methylated to form 5-methylcytosine"
cgataagtgccctgtggcatctggctcctctcactcagcgtggtgttttcaagggtcatccgtggtgtggcgcgtgtcagtgcttccttcctgtggctgaatcatgttccattgtatggatg

SEQ ID NO: 2347 - DNA, 122 bp, Homo sapiens
  misc_feature (61)..(62): /note="This region represents a CpG dinucleotide"
  misc_feature (61)..(61): /note="Nucleotide may be methylated to form 5-methylcytosine"
tcttaaacattatccaatcaggcacgcagctggagcgacaggacggtttccggaatatggcggggcgtttggctcttgctgcagccagagctccaggtctcgtcttcatttctgtgtccttt

SEQ ID NO: 2348 - DNA, 122 bp, Homo sapiens
  misc_feature (61)..(62): /note="This region represents a CpG dinucleotide"
  misc_feature (61)..(61): /note="Nucleotide may be methylated to form 5-methylcytosine"
ctttgcttggaatctgatgaagtgaacagcccagattgttttcttttttctttgccagtgcgtgcatgtgtgtatgtgtttctgtatgtatgtatatatataacttctgtgtgtgtgtgtat

SEQ ID NO: 2349 - DNA, 122 bp, Homo sapiens
  misc_feature (61)..(62): /note="This region represents a CpG dinucleotide"
  misc_feature (61)..(61): /note="Nucleotide may be methylated to form 5-methylcytosine"
aaaaatcattgctttgtttgcagcagtaaaactgacggtagagtttccaacacgaaagcccgtgtggtcgcgccgggagctcacggcgttccaagcggcacttatcccgcgttgatgcccag

SEQ ID NO: 2350 - DNA, 122 bp, Homo sapiens
  misc_feature (61)..(62): /note="This region represents a CpG dinucleotide"
  misc_feature (61)..(61): /note="Nucleotide may be methylated to form 5-methylcytosine"
tatggattataggaaacccgaaacagatgttggtagctgagcaaggccttcgggagtttacgggacaatagagagaaaatccagtagagtggaaacattcaataaggagccagaaaagggcc

SEQ ID NO: 2351 - DNA, 122 bp, Homo sapiens
  misc_feature (61)..(62): /note="This region represents a CpG dinucleotide"
  misc_feature (61)..(61): /note="Nucleotide may be methylated to form 5-methylcytosine"
ttgaaaagctcctaaacaagcaccaactcggcaatcttccaccctgattctcttggatggcgaaaagaaaatacttcagagttgctcaccactgggcggcacttggagtgaggtcatgtttg

SEQ ID NO: 2352 - DNA, 122 bp, Homo sapiens
  misc_feature (61)..(62): /note="This region represents a CpG dinucleotide"
  misc_feature (61)..(61): /note="Nucleotide may be methylated to form 5-methylcytosine"
gagccaccgtgctcagccgcaaaattctttatgaattttacacttggcaaatgttaatgacggaagccatagtctgctcctaatacatgtccaaagcattgactgttgtgtcattagctgcc

SEQ ID NO: 2353 - DNA, 122 bp, Homo sapiens
  misc_feature (61)..(62): /note="This region represents a CpG dinucleotide"
  misc_feature (61)..(61): /note="Nucleotide may be methylated to form 5-methylcytosine"
tacttttgactttttatgatgtggaccttactatgatatgggcaccgaaactaaagcaaacggtggaagaaaaattggtattgtacagacacatttttagagaaatgaaaaagcaaccaagt

SEQ ID NO: 2354 - DNA, 122 bp, Homo sapiens
  misc_feature (61)..(62): /note="This region represents a CpG dinucleotide"
  misc_feature (61)..(61): /note="Nucleotide may be methylated to form 5-methylcytosine"
gaggttcactggacgttttgggaaactgtaaggcaaaaataaaattctaagcctcccaaccgactgaatggacctccctctcagcccagggcattccaaaataaacctgaaaaattaattca

SEQ ID NO: 2355 - DNA, 122 bp, Homo sapiens
  misc_feature (61)..(62): /note="This region represents a CpG dinucleotide"
  misc_feature (61)..(61): /note="Nucleotide may be methylated to form 5-methylcytosine"
tgccagctctggcaggacgcagccgcaggctcagaatcaacacgcaattccctgcacaggcgtctgcagagcaaggttcaggcctgcttcatcagtaattctcaaaggtgatgaactctacg

SEQ ID NO: 2356 - DNA, 122 bp, Homo sapiens
  misc_feature (61)..(62): /note="This region represents a CpG dinucleotide"
  misc_feature (61)..(61): /note="Nucleotide may be methylated to form 5-methylcytosine"
acagacgctcgggggcagaccaagacgccctggggtccccgaaacagagatgtacagagtcggacacggaaagggagagaccagctcacggttaagaaaggagggagaccagcccaggatca

SEQ ID NO: 2357 - DNA, 122 bp, Homo sapiens
  misc_feature (61)..(62): /note="This region represents a CpG dinucleotide"
  misc_feature (61)..(61): /note="Nucleotide may be methylated to form 5-methylcytosine"
atgagtccaggtactgaagagtcagcacacgatttccagggtggagacatctgaacctctcgcaggtttttagggagaggaagagcttgtaagagcacacaaaagggaaacaacatggcgca

SEQ ID NO: 2358 - DNA, 122 bp, Homo sapiens
  misc_feature (61)..(62): /note="This region represents a CpG dinucleotide"
  misc_feature (61)..(61): /note="Nucleotide may be methylated to form 5-methylcytosine"
aaaaactgaaaacaatccaaatgtctgtcaaccaatgaatggatacgacaagctatggcccgtgtactattcaagaacaaaaagcaaaggacaattgattcatgttacagcttggataaacc

SEQ ID NO: 2359 - DNA, 122 bp, Homo sapiens
  misc_feature (61)..(62): /note="This region represents a CpG dinucleotide"
  misc_feature (61)..(61): /note="Nucleotide may be methylated to form 5-methylcytosine"
gtctcagtggggggaaagccaggctttcttgggcagtggtccctgcagctttctgcagtgcgttgtgtccccggttaatcgagaatggagaatggcgatgacttttaccaagcatactgcct

SEQ ID NO: 2360 - DNA, 122 bp, Homo sapiens
  misc_feature (61)..(62): /note="This region represents a CpG dinucleotide"
  misc_feature (61)..(61): /note="Nucleotide may be methylated to form 5-methylcytosine"
aactcaaaggaacttttactgaggatgaataacttctttggtaaagatgaatgactctcacgtcctagacactgaggtgcagtcacgtgccagagctctttaattgctagtagttggatttc

SEQ ID NO: 2361 - DNA, 122 bp, Homo sapiens
  misc_feature (61)..(62): /note="This region represents a CpG dinucleotide"
  misc_feature (61)..(61): /note="Nucleotide may be methylated to form 5-methylcytosine"
agaaaatgaaaccacggactggggagactaactgtattactctcactttgtatatgaggacgcagaaccacagagaggttaagacacctgcctaaggctgcacagacaggaggtggcacagc

SEQ ID NO: 2362 - DNA, 122 bp, Homo sapiens
  misc_feature (61)..(62): /note="This region represents a CpG dinucleotide"
  misc_feature (61)..(61): /note="Nucleotide may be methylated to form 5-methylcytosine"
gtttttcaataaatgacacctgcatgtggctcagaattcaaaaattacagaaaggtatatcgcaaaaacctaccttgtcaaccagttttgcacacatattttaggttcttcagatgacaatg

SEQ ID NO: 2363 - DNA, 122 bp, Homo sapiens
  misc_feature (61)..(62): /note="This region represents a CpG dinucleotide"
  misc_feature (61)..(61): /note="Nucleotide may be methylated to form 5-methylcytosine"
acccaaacctcatgtcgaactgggatcccccgtgtcagaggcggccgcgtgggaggtgaccggatcgcgggtggacccttcatgaagggttcagcaccatccccttggtgctgtcctgggac

SEQ ID NO: 2364 - DNA, 122 bp, Homo sapiens
  misc_feature (61)..(62): /note="This region represents a CpG dinucleotide"
  misc_feature (61)..(61): /note="Nucleotide may be methylated to form 5-methylcytosine"
ttagctgaagaggaagggctggaaagcgagaggctcagagatctggcagaacaactctggcgagtcaggaagacctaatcagaattaaacgtgtagccaattcaagagagtttgtaagcgag

SEQ ID NO: 2365 - DNA, 122 bp, Homo sapiens
  misc_feature (61)..(62): /note="This region represents a CpG dinucleotide"
  misc_feature (61)..(61): /note="Nucleotide may be methylated to form 5-methylcytosine"
aactcctatttttaaaaccattggatctcatgagacccattcacaaacccaagaacagcacgggaaagctctgccctcacaattcaatcctctctcactgggtccctcccacaacacatggg

SEQ ID NO: 2366 - DNA, 122 bp, Homo sapiens
  misc_feature (61)..(62): /note="This region represents a CpG dinucleotide"
  misc_feature (61)..(61): /note="Nucleotide may be methylated to form 5-methylcytosine"
cagaagttagttggaagttaaaacaactgttatagttgcttctattaaggatataattgacgctatgggaaatacactgcttagctttggtgcagagcctgaatgatcaatttgccaaaaga

SEQ ID NO: 2367 - DNA, 122 bp, Homo sapiens
  misc_feature (61)..(62): /note="This region represents a CpG dinucleotide"
  misc_feature (61)..(61): /note="Nucleotide may be methylated to form 5-methylcytosine"
agtctgttttcacaccgctaaaaagagctacctgagactgggtaatttatgaagaaaatacgtttaatcacctcaaagttccataggcagtacaggaagcatggctgggaggcctcaggaaa

SEQ ID NO: 2368 - DNA, 122 bp, Homo sapiens
  misc_feature (61)..(62): /note="This region represents a CpG dinucleotide"
  misc_feature (61)..(61): /note="Nucleotide may be methylated to form 5-methylcytosine"
cgtaactccctctcttatgtgtcctcccagaattttactcagtcacgttgctcactgctgcgcactcctgcagacgcatcccagtggactctgcgctgcatccccagagtacagcgagtttc

SEQ ID NO: 2369 - DNA, 122 bp, Homo sapiens
  misc_feature (61)..(62): /note="This region represents a CpG dinucleotide"
  misc_feature (61)..(61): /note="Nucleotide may be methylated to form 5-methylcytosine"
ttgctgtttgaaatggccccgagtacagtgctgaagtgccatctagtgtttctaagcacacgaaggctacgatgagccttatggaaaaaatatgtgtgttagacaagcttcattcagtcatg

SEQ ID NO: 2370 - DNA, 122 bp, Homo sapiens
  misc_feature (61)..(62): /note="This region represents a CpG dinucleotide"
  misc_feature (61)..(61): /note="Nucleotide may be methylated to form 5-methylcytosine"
tggtgatacagctgagccctgattggttgatacagctgagctctgattggctgaagcagacgagctctgactgcttggttcatgtgagctctgaaagtcccaagtcaaaagggtgtggggtt

SEQ ID NO: 2371 - DNA, 122 bp, Homo sapiens
  misc_feature (61)..(62): /note="This region represents a CpG dinucleotide"
  misc_feature (61)..(61): /note="Nucleotide may be methylated to form 5-methylcytosine"
tccgcggacccactgatagaccagaagcgctgttcgggggtggggagggctgggctggggcgagggcctatttgctgctgtgactctacaggaaccaagactctagggaagtggagactgga

SEQ ID NO: 2372 - DNA, 122 bp, Homo sapiens
  misc_feature (61)..(62): /note="This region represents a CpG dinucleotide"
  misc_feature (61)..(61): /note="Nucleotide may be methylated to form 5-methylcytosine"
tgttattgaagcccagctacctgaactggagcccaggagcctgcaagcgcaggctgctgtcggagtccccgtggcttcgtctgccccagacttcactactaatgttgcccctgccatcaacg

SEQ ID NO: 2373 - DNA, 122 bp, Homo sapiens
  misc_feature (61)..(62): /note="This region represents a CpG dinucleotide"
  misc_feature (61)..(61): /note="Nucleotide may be methylated to form 5-methylcytosine"
cttgggttatgggtgaatcaaaatctcagaaaccatcactaaagaacttacacatgtaaccgaaaaccacctgttccccaaaactattgaaataaaataaaataaaataaaaatagcagata

SEQ ID NO: 2374 - DNA, 122 bp, Homo sapiens
  misc_feature (61)..(62): /note="This region represents a CpG dinucleotide"
  misc_feature (61)..(61): /note="Nucleotide may be methylated to form 5-methylcytosine"
gaggaattacagtcatgccttcggatgtgtcttcagcctagcgaatgatgacagcaatgacgaagcatttcatcagcttgaacacatccttcaccccagaatttccacctggtacccccaca

SEQ ID NO: 2375 - DNA, 122 bp, Homo sapiens
  misc_feature (61)..(62): /note="This region represents a CpG dinucleotide"
  misc_feature (61)..(61): /note="Nucleotide may be methylated to form 5-methylcytosine"
tgttctatattttctaaattgctttatactaaatttcttttgttcaaaatatttttcctacgtagaacaaagaggtgaagaaaaagactttagagtcaaagaaagtatctgcatctacctta

SEQ ID NO: 2376 - DNA, 122 bp, Homo sapiens
  misc_feature (61)..(62): /note="This region represents a CpG dinucleotide"
  misc_feature (61)..(61): /note="Nucleotide may be methylated to form 5-methylcytosine"
gatttctcctttcctctgccttgttgttctatgtgggcccccagctgattggatggtgcccgcctacattgagggcagatctttcccactcggtccactgactcacatgccagtctcctctg

SEQ ID NO: 2377 - DNA, 122 bp, Homo sapiens
  misc_feature (61)..(62): /note="This region represents a CpG dinucleotide"
  misc_feature (61)..(61): /note="Nucleotide may be methylated to form 5-methylcytosine"
cagcttgtttattactcaggtacggagctggactatcttactgagcctgttctcctggggcggcctcggctgctgctcctctgagggctcggccctgggtggggtgcaatcacctttggtgg

SEQ ID NO: 2378 - DNA, 122 bp, Homo sapiens
  misc_feature (61)..(62): /note="This region represents a CpG dinucleotide"
  misc_feature (61)..(61): /note="Nucleotide may be methylated to form 5-methylcytosine"
tataactggcagctcagtaggtttatttccaccagcatcacaacaaacttgtgagtaacacgttgccctatgacattatgatggctatgacactagacgataggaatttttcagctccatta

SEQ ID NO: 2379 - DNA, 122 bp, Homo sapiens
  misc_feature (61)..(62): /note="This region represents a CpG dinucleotide"
  misc_feature (61)..(61): /note="Nucleotide may be methylated to form 5-methylcytosine"
tgaaacatgtataaagaagagagaatggcgtgcacgccccgtgtctctctcaggagtgtgcgagttttcgtgtgcagcctgtttcatccctgcaccgcacaggagggacacacagtgccatc

SEQ ID NO: 2380 - DNA, 122 bp, Homo sapiens
  misc_feature (61)..(62): /note="This region represents a CpG dinucleotide"
  misc_feature (61)..(61): /note="Nucleotide may be methylated to form 5-methylcytosine"
agtgacccaagatgcaggtgcaccccatactctgtctgtggtctcaatataaaatgtggccgtagcttttaaatgtacctggatgttatataactaataaaatacgtgttcatttaaaaatg

SEQ ID NO: 2381 - DNA, 122 bp, Homo sapiens
  misc_feature (61)..(62): /note="This region represents a CpG dinucleotide"
  misc_feature (61)..(61): /note="Nucleotide may be methylated to form 5-methylcytosine"
ctgcagactcccggcgctgccgccgccacccagcgtagtctccggctgggcacagcgttccgcccttctcgcggccccgggcgcccacccatccgtcatggcccaggcctgggccaaacagc

SEQ ID NO: 2382 - DNA, 122 bp, Homo sapiens
  misc_feature (61)..(62): /note="This region represents a CpG dinucleotide"
  misc_feature (61)..(61): /note="Nucleotide may be methylated to form 5-methylcytosine"
agtttctatcctattccatttctgatttgtgatctcagaaatctgtcttcacactaatcccgccattatgactctcttggcgcccccgcctgtcatgtgaacagaagacaggccaagaacat

SEQ ID NO: 2383 - DNA, 122 bp, Homo sapiens
  misc_feature (61)..(62): /note="This region represents a CpG dinucleotide"
  misc_feature (61)..(61): /note="Nucleotide may be methylated to form 5-methylcytosine"
atctaaaaattaaatgagctgataaagaacgccgtcagcacagagcagacgctgggtgttcgcgctcttgagcgtgcgctctgcggggcgcgggctggtggcgggcgggggtcgccggctcc

SEQ ID NO: 2384 - DNA, 122 bp, Homo sapiens
  misc_feature (61)..(62): /note="This region represents a CpG dinucleotide"
  misc_feature (61)..(61): /note="Nucleotide may be methylated to form 5-methylcytosine"
agaaagaataaaaaattcatattgcatggcttttgtagcctaagagcacagaatcatacacgtgtgttaggagaaacattcattctcacgcatataaactggctcctggcagagtagagcag

SEQ ID NO: 2385 - DNA, 122 bp, Homo sapiens
  misc_feature (61)..(62): /note="This region represents a CpG dinucleotide"
  misc_feature (61)..(61): /note="Nucleotide may be methylated to form 5-methylcytosine"
cagagccctcaacctcccttggacgccgccatcttccgcatgacacctacggcgcgccgtcgccgccgcgcgcctcctgcgcacacccccagtcaatcagcatcacaaacgcacctcgcccc

SEQ ID NO: 2386 - DNA, 122 bp, Homo sapiens
  misc_feature (61)..(62): /note="This region represents a CpG dinucleotide"
  misc_feature (61)..(61): /note="Nucleotide may be methylated to form 5-methylcytosine"
aaaaaaaaaaaaaaaaaaatctaagtttccgcgacccaaatttacattcctaggtcagaacgtgtctgactggaccagctggagttacgtgcctgcccacgatctaatcagctgtggcagac

SEQ ID NO: 2387 - DNA, 122 bp, Homo sapiens
  misc_feature (61)..(62): /note="This region represents a CpG dinucleotide"
  misc_feature (61)..(61): /note="Nucleotide may be methylated to form 5-methylcytosine"
atgaggaaactgaggcaccagacattaaaataactttcccgggatcacacagctgggaagcgcttaaatccaggtagtctagctccagcactcaggccctcaaatgctacagttaggctgcc

SEQ ID NO: 2388 - DNA, 122 bp, Homo sapiens
  misc_feature (61)..(62): /note="This region represents a CpG dinucleotide"
  misc_feature (61)..(61): /note="Nucleotide may be methylated to form 5-methylcytosine"
gataggaacaagttcctcaagccaacttacaaatcctccttttcttagacaggaatcgcccggggatgagctcaacacatactccaccatgctaacgcctagtcccccactctccgatcgtg

SEQ ID NO: 2389 - DNA, 122 bp, Homo sapiens
  misc_feature (61)..(62): /note="This region represents a CpG dinucleotide"
  misc_feature (61)..(61): /note="Nucleotide may be methylated to form 5-methylcytosine"
tctcaaagcaaagaaaacgtggagagacagtgctgcgcgcggcttggatctccgtcaatacggtactagcgggagcttccgaggtcaacctagggtccacggggaccctcctagtggacatg

SEQ ID NO: 2390 - DNA, 122 bp, Homo sapiens
  misc_feature (61)..(62): /note="This region represents a CpG dinucleotide"
  misc_feature (61)..(61): /note="Nucleotide may be methylated to form 5-methylcytosine"
cgcattaagaaaagctggagccgaggtgtggtgtagtgctggccatgatgcaaagctcagcgtgctgccccaaatgagtccctctgagcagcaggcattgtggagagactcaagctctaatt

SEQ ID NO: 2391 - DNA, 122 bp, Homo sapiens
  misc_feature (61)..(62): /note="This region represents a CpG dinucleotide"
  misc_feature (61)..(61): /note="Nucleotide may be methylated to form 5-methylcytosine"
tttcttgagatggagtctcctggtgaagtttttgtgaacattgatgataacaaaggacttcgcatagcacatcaacttagttgattaagcagtagcagggtttgagaggattgactccaatt

SEQ ID NO: 2392 - DNA, 122 bp, Homo sapiens
  misc_feature (61)..(62): /note="This region represents a CpG dinucleotide"
  misc_feature (61)..(61): /note="Nucleotide may be methylated to form 5-methylcytosine"
ttaaatctacctcaacattgtgccaaacactgaagcagcaaaaaattaaatcaaaaaatacgaagagataaataagaaaagggtagcgtgatcatgattactgtcactggatttactggtct

SEQ ID NO: 2393 - DNA, 122 bp, Homo sapiens
  misc_feature (61)..(62): /note="This region represents a CpG dinucleotide"
  misc_feature (61)..(61): /note="Nucleotide may be methylated to form 5-methylcytosine"
aaaggagagttggaagggttcgtgcagcaggacagcgggcggaagcggggcgggcgagcgcggggccgccggccggcagccggagcagctgccgcggcgcccgaatcccggcggccgccgcg

SEQ ID NO: 2394 - DNA, 122 bp, Homo sapiens
  misc_feature (61)..(62): /note="This region represents a CpG dinucleotide"
  misc_feature (61)..(61): /note="Nucleotide may be methylated to form 5-methylcytosine"
tgctccccatccccaaataaaatgccaaacttcaattaccagttcgtaagtagtctgcatcgctttatttttccttctgacagtaggtgtttggtgtcaatgtacattttcttaccacaatg

SEQ ID NO: 2395 - DNA, 122 bp, Homo sapiens
  misc_feature (61)..(62): /note="This region represents a CpG dinucleotide"
  misc_feature (61)..(61): /note="Nucleotide may be methylated to form 5-methylcytosine"
cacacacacacacgtcggtccacacgggatgctccctctcactttagtgaggaacattcccgactcccagcgatcccgacctccgcctcccatgcgactgctcgggcagactgtctcacccg

SEQ ID NO: 2396 - DNA, 122 bp, Homo sapiens
  misc_feature (61)..(62): /note="This region represents a CpG dinucleotide"
  misc_feature (61)..(61): /note="Nucleotide may be methylated to form 5-methylcytosine"
gcacttgttaaaccagggatataatgtacaccagtagagatctccctttgcgtccagtgacgttggctgactgccaagcttttatcccttcttgccatcgctgcacagtgtttgatggtctc

SEQ ID NO: 2397 - DNA, 122 bp, Homo sapiens
  misc_feature (61)..(62): /note="This region represents a CpG dinucleotide"
  misc_feature (61)..(61): /note="Nucleotide may be methylated to form 5-methylcytosine"
agaatattaaagtttgtgagccctttaaagccaaacaggcacatttttccttctccccgacggacattttaatgtcactgcagtagctgaagtcttaggtgtcgttaacccacgtgcctacc

SEQ ID NO: 2398 - DNA, 122 bp, Homo sapiens
  misc_feature (61)..(62): /note="This region represents a CpG dinucleotide"
  misc_feature (61)..(61): /note="Nucleotide may be methylated to form 5-methylcytosine"
tccccttttatacgatttccagctaacaagtagagaaggagaggtagaatcagaacattgcgttttgcaatctttgatgagaagagcatctagacttcgctggtcaaaggccaccgagactg

SEQ ID NO: 2399 - DNA, 122 bp, Homo sapiens
  misc_feature (61)..(62): /note="This region represents a CpG dinucleotide"
  misc_feature (61)..(61): /note="Nucleotide may be methylated to form 5-methylcytosine"
agctggatggtttgatgcctcaagtcagaagaccacactgcctgcgtctgaaccccagctcgccagctgtgagatcttgggcaacttaatgtacctttcagagcctcaacattttcatctgt

SEQ ID NO: 2400 - DNA, 122 bp, Homo sapiens
  misc_feature (61)..(62): /note="This region represents a CpG dinucleotide"
  misc_feature (61)..(61): /note="Nucleotide may be methylated to form 5-methylcytosine"
ttcctactccaagcacttgagggtgcctgctccttctgcctggcctttccccactccaagcgcccactccaatctcagagcaaagtggaggctgagcctgagtgctgtcacaacctggctag

SEQ ID NO: 2401 - DNA, 122 bp, Homo sapiens
  misc_feature (61)..(62): /note="This region represents a CpG dinucleotide"
  misc_feature (61)..(61): /note="Nucleotide may be methylated to form 5-methylcytosine"
cagtaccccagagcctccagcctggcagtccgggctccaggtacctctagagggctgtggcgcacactatgcataagtcacagggacactggcatgaactggtaagtccagatgacagtgac

SEQ ID NO: 2402 - DNA, 122 bp, Homo sapiens
  misc_feature (61)..(62): /note="This region represents a CpG dinucleotide"
  misc_feature (61)..(61): /note="Nucleotide may be methylated to form 5-methylcytosine"
aaagttgccagaaatcctgattcagaatgtcgtttttagaagaagctagtctctctcatgcgggtggtttaggaatgacatattagcatggttcatctttggctttaggaaacgtgttcaac

SEQ ID NO: 2403 - DNA, 122 bp, Homo sapiens
  misc_feature (61)..(62): /note="This region represents a CpG dinucleotide"
  misc_feature (61)..(61): /note="Nucleotide may be methylated to form 5-methylcytosine"
actctattctactttgttttttcatagcaactagtgcacgcttggcttatacagagaagacgctgaaaaaaaagtttattgtgtgaaagctcaagtggtcagcctggtgcaggaagaaggaa

SEQ ID NO: 2404 - DNA, 122 bp, Homo sapiens
  misc_feature (61)..(62): /note="This region represents a CpG dinucleotide"
  misc_feature (61)..(61): /note="Nucleotide may be methylated to form 5-methylcytosine"
gagagcaagaaggagatctctatctttttccaccatgtgagtacatagcaagaaggcaaccgtcagcaagccaggaagagagacctcatcagaacccaaccatgccagcgccttggtcttgg

SEQ ID NO: 2405 - DNA, 122 bp, Homo sapiens
  misc_feature (61)..(62): /note="This region represents a CpG dinucleotide"
  misc_feature (61)..(61): /note="Nucleotide may be methylated to form 5-methylcytosine"
aaatcacctttaatttacttgctttttcttttttttctttttctagatactaaaatggatcgtaaggataagctatttgtgattaacgaggtaattttggaaagtaattgcaacaaaatatt

SEQ ID NO: 2406 - DNA, 122 bp, Homo sapiens
  misc_feature (61)..(62): /note="This region represents a CpG dinucleotide"
  misc_feature (61)..(61): /note="Nucleotide may be methylated to form 5-methylcytosine"
ggggaggacacgaagacatacatcacctggctcctcagtggccttgctctgctgcttgagcgcctcacttgttatacagccaacacctgctagctgagtgggggttctctgtgataacagct

SEQ ID NO: 2407 - DNA, 122 bp, Homo sapiens
  misc_feature (61)..(62): /note="This region represents a CpG dinucleotide"
  misc_feature (61)..(61): /note="Nucleotide may be methylated to form 5-methylcytosine"
gaagagatactcagtgcacaaagtagactgtgaaagactttggggaaatcatgcaatcaccgagagactaattgatggcattccccaaatttatgtgtaccagaaaagagagatggtcctga

SEQ ID NO: 2408 - DNA, 122 bp, Homo sapiens
  misc_feature (61)..(62): /note="This region represents a CpG dinucleotide"
  misc_feature (61)..(61): /note="Nucleotide may be methylated to form 5-methylcytosine"
tgcctacatggctgtgataacaagtggagttatacgcctctgtctaaacttgctgagtcacgcaggatgtaaacatcttaccttggcctatccttgaccaaagcacagccatgttccttaca

SEQ ID NO: 2409 - DNA, 122 bp, Homo sapiens
  misc_feature (61)..(62): /note="This region represents a CpG dinucleotide"
  misc_feature (61)..(61): /note="Nucleotide may be methylated to form 5-methylcytosine"
caggaacacatttggatattgacacaacttcatctgcagttggcttgtcatcctgagctccgttcccaggcagcgtagatattgcacaggattttgctgaccagggagttgggttataagtg

SEQ ID NO: 2410 - DNA, 122 bp, Homo sapiens
  misc_feature (61)..(62): /note="This region represents a CpG dinucleotide"
  misc_feature (61)..(61): /note="Nucleotide may be methylated to form 5-methylcytosine"
tctggatgataaacagctcaacaacagtgcccttttttgctcttcttgggccttccccagcgcaagacttgacatctgagctcatcagtgcttcctgaatgagtgaataaaagacgtgctgc

SEQ ID NO: 2411 - DNA, 122 bp, Homo sapiens
  misc_feature (61)..(62): /note="This region represents a CpG dinucleotide"
  misc_feature (61)..(61): /note="Nucleotide may be methylated to form 5-methylcytosine"
tttgaattgtcattcaaaaaacttccgttcgtttgcattttacaggccccaaatcactcacggcctctgcccctgtgtgtgtgcaagagccaaaagaaagttaagcaacctcacattaattg

SEQ ID NO: 2412 - DNA, 122 bp, Homo sapiens
  misc_feature (61)..(62): /note="This region represents a CpG dinucleotide"
  misc_feature (61)..(61): /note="Nucleotide may be methylated to form 5-methylcytosine"
gctttccactgagtaaaattcttttggaactcaaagtagtatgtttcttggaaaacatttcgttgttgggaaataactcatacactcatgaaacactcagaaaagagaattctctgtatctc

SEQ ID NO: 2413 - DNA, 122 bp, Homo sapiens
  misc_feature (61)..(62): /note="This region represents a CpG dinucleotide"
  misc_feature (61)..(61): /note="Nucleotide may be methylated to form 5-methylcytosine"
gtttcacctataacctcattatatgttcattaacttactaaatcacacacccaccagtgccgtgatagtccgggaacacccaaattggtgtaaaaatgggtggtaccacagttccaggaaat

SEQ ID NO: 2414 - DNA, 122 bp, Homo sapiens
  misc_feature (61)..(62): /note="This region represents a CpG dinucleotide"
  misc_feature (61)..(61): /note="Nucleotide may be methylated to form 5-methylcytosine"
attactcattctctcactgactcacacagagcaacttcccgtcctgaaaagttcatttatcgtaagtaccctgtaaagatgtaccattttttatcttttataccatgttttactgtacgttt

SEQ ID NO: 2415 - DNA, 122 bp, Homo sapiens
  misc_feature (61)..(62): /note="This region represents a CpG dinucleotide"
  misc_feature (61)..(61): /note="Nucleotide may be methylated to form 5-methylcytosine"
ggccgtccatgtcatggttggtccacagggtccctggacacagacactggagagctcccccggggcccacagcaggactttcaactggcaaacccaccagtgtcgtcattagaggaagagcc

SEQ ID NO: 2416 - DNA, 122 bp, Homo sapiens
  misc_feature (61)..(62): /note="This region represents a CpG dinucleotide"
  misc_feature (61)..(61): /note="Nucleotide may be methylated to form 5-methylcytosine"
aatatcctccttaaaagagattcctcccattccagttaagttgccctagttaatgcctcacggagcagagataagctgttattaataagccctgttcaaactgcagaatttgagcaaataaa

SEQ ID NO: 2417 - DNA, 122 bp, Homo sapiens
  misc_feature (61)..(62): /note="This region represents a CpG dinucleotide"
  misc_feature (61)..(61): /note="Nucleotide may be methylated to form 5-methylcytosine"
tagctgggattacaggcatacaccaccatacccggctaatttttgtatttttagtagagacgggttttctccaggttgggcaggttggtgctgaactcccagcctcaagtgatctgcctgct

SEQ ID NO: 2418 - DNA, 122 bp, Homo sapiens
  misc_feature (61)..(62): /note="This region represents a CpG dinucleotide"
  misc_feature (61)..(61): /note="Nucleotide may be methylated to form 5-methylcytosine"
ccataaagtctaatccagcctgttgctaaccgggttctgacttcagggcaagacactttacgtgctttggctctggagcctggaagagaatgttgtgtggaatggatctctcaggtgatcaa

SEQ ID NO: 2419 - DNA, 122 bp, Homo sapiens
  misc_feature (61)..(62): /note="This region represents a CpG dinucleotide"
  misc_feature (61)..(61): /note="Nucleotide may be methylated to form 5-methylcytosine"
aggagcttctttacaaatgaacctttgtctgccttgtctctggcctgggatcgacagactcgctgctccagccaggactgtggggaggaggggagtggaaggagacaaggctgcaaggactg

SEQ ID NO: 2420 - DNA, 122 bp, Homo sapiens
  misc_feature (61)..(62): /note="This region represents a CpG dinucleotide"
  misc_feature (61)..(61): /note="Nucleotide may be methylated to form 5-methylcytosine"
tggcacagccagcccacgggactgggaagacccatgttcccagctccctggcgacaacggcgacaaggccatgcacccggtgcttactggatgccagcccctgtgctaattgctctttatgt

SEQ ID NO: 2421 - DNA, 122 bp, Homo sapiens
  misc_feature (61)..(62): /note="This region represents a CpG dinucleotide"
  misc_feature (61)..(61): /note="Nucleotide may be methylated to form 5-methylcytosine"
tctcgttacaaaaaagtgcgttccttcttcaggaggatcgagtagaaaatattttctactcgaagaggccatggggaagtgatggtcaaatctctgttgtgaagcaagtttccacacagaaa

SEQ ID NO: 2422 - DNA, 122 bp, Homo sapiens
  misc_feature (61)..(62): /note="This region represents a CpG dinucleotide"
  misc_feature (61)..(61): /note="Nucleotide may be methylated to form 5-methylcytosine"
gccctagccggtccggcctctctccagtccatcctgaacccctggaaaacccataaaggccgctctcctggccggctctgtctctctggactgcagtccagccccccaccctggccaacacc

SEQ ID NO: 2423 - DNA, 122 bp, Homo sapiens
  misc_feature (61)..(62): /note="This region represents a CpG dinucleotide"
  misc_feature (61)..(61): /note="Nucleotide may be methylated to form 5-methylcytosine"
gggccccaggaaatatcctggccagctttgaggctggcctctgtgtcacattcctgccagcgctccagatggcagccgtgcatgctcatgatgtcaggttatacaagctacaccaataaatg

SEQ ID NO: 2424 - DNA, 122 bp, Homo sapiens
  misc_feature (61)..(62): /note="This region represents a CpG dinucleotide"
  misc_feature (61)..(61): /note="Nucleotide may be methylated to form 5-methylcytosine"
gggtggccctgtaggcctttctagggatttacagttctgcagacttaaagctgctagggacgggaaaagtgtcagttgacagcaaaatcacaggtggcaaattttgtgcaatactcatactc

SEQ ID NO: 2425 - DNA, 122 bp, Homo sapiens
  misc_feature (61)..(62): /note="This region represents a CpG dinucleotide"
  misc_feature (61)..(61): /note="Nucleotide may be methylated to form 5-methylcytosine"
ttccattgcccaaggaagcatcaaatacgtatgtttgttcacctactcttatagtcaatgcgttcatcgtttcagcctaaaaataatagtctgtccctttagccagttttcatgtctgcaca

SEQ ID NO: 2426 - DNA, 122 bp, Homo sapiens
  misc_feature (61)..(62): /note="This region represents a CpG dinucleotide"
  misc_feature (61)..(61): /note="Nucleotide may be methylated to form 5-methylcytosine"
cagtccgctgaccaaagccgcagtgttcaggccccggggtttcccagccgtagtggccgccgccacagctgcgcgctttattgtctgctttcagtcgcaggtgacctcgagcgatctcgaca

SEQ ID NO: 2427 - DNA, 122 bp, Homo sapiens
  misc_feature (61)..(62): /note="This region represents a CpG dinucleotide"
  misc_feature (61)..(61): /note="Nucleotide may be methylated to form 5-methylcytosine"
gtcataatccgtggatgacaagtcagccagggtcagtatgtagtgactctgttgggtgtacgtgcttgagccacacacacagcagtgcaaaacctgtgaaaacagaggccatgtgcaccacg

SEQ ID NO: 2428 - DNA, 122 bp, Homo sapiens
  misc_feature (61)..(62): /note="This region represents a CpG dinucleotide"
  misc_feature (61)..(61): /note="Nucleotide may be methylated to form 5-methylcytosine"
ctctaataaacaacatacacaaaccactttctctctagatctctaggggtggggctcaggcgttagtatttttaaaaactccctgggtgacattaatgtgttgccaggcttcagaatcactg

SEQ ID NO: 2429 - DNA, 122 bp, Homo sapiens
  misc_feature (61)..(62): /note="This region represents a CpG dinucleotide"
  misc_feature (61)..(61): /note="Nucleotide may be methylated to form 5-methylcytosine"
aaaaataattggtaagctcaaaggtaggctatttaaaatacaaagtcaagaccgcagccgcggagccgcgatgcctaaaggagggagaaagggaggccacaaaggccaggcgaggcagtata

SEQ ID NO: 2430 - DNA, 122 bp, Homo sapiens
  misc_feature (61)..(62): /note="This region represents a CpG dinucleotide"
  misc_feature (61)..(61): /note="Nucleotide may be methylated to form 5-methylcytosine"
cagctacttgggaggctgaggtggattgccttagtccaggaggtcaagtttgcagtgttacgatggtaccagcctgggcaacagagccaagaccctgtctcaaaaacaaaaaaagaaagaaa

SEQ ID NO: 2431 - DNA, 122 bp, Homo sapiens
  misc_feature (61)..(62): /note="This region represents a CpG dinucleotide"
  misc_feature (61)..(61): /note="Nucleotide may be methylated to form 5-methylcytosine"
agtcagtgtggatgagaactaactgccaattgtcatatatgtcaaataaagctataaacccgctaaaaataattgtgacggctcctctgaaagttgaatatacaattactatatgactcact

SEQ ID NO: 2432 - DNA, 122 bp, Homo sapiens
  misc_feature (61)..(62): /note="This region represents a CpG dinucleotide"
  misc_feature (61)..(61): /note="Nucleotide may be methylated to form 5-methylcytosine"
ccctcctcacccttcaattgtcagaatatcctcattcttcttcaatgcagaacaagaactcgggaaccaccaaatgcaggtatgagctataacacagccatatgtgcaagtcaggcacagac

SEQ ID NO: 2433 - DNA, 122 bp, Homo sapiens
  misc_feature (61)..(62): /note="This region represents a CpG dinucleotide"
  misc_feature (61)..(61): /note="Nucleotide may be methylated to form 5-methylcytosine"
atttgtttttcatctggatatttgattctgcatatcctagcccaagtgaaccgagaagatcgagttgtaggactaaaggatagacatgcagaaatgcattttaaaaatctgttagctggacc

SEQ ID NO: 2434 - DNA, 122 bp, Homo sapiens
  misc_feature (61)..(62): /note="This region represents a CpG dinucleotide"
  misc_feature (61)..(61): /note="Nucleotide may be methylated to form 5-methylcytosine"
actagagcattgcctaataagctgtcaaaagtgtcatctgtacacgattctcagtcttggcgctattgaaattttggtctgggtaattctttgccgtgggggctgttcagggcgtaataggt

SEQ ID NO: 2435 - DNA, 122 bp, Homo sapiens
  misc_feature (61)..(62): /note="This region represents a CpG dinucleotide"
  misc_feature (61)..(61): /note="Nucleotide may be methylated to form 5-methylcytosine"
ctctggatgcttgcatttgacatacatgtgctcatcctgtgctcatcttacttgacctttcggcagcgttagataccactgtatactccctctattttgaaatactttcttcccttgccttt

SEQ ID NO: 2436 - DNA, 122 bp, Homo sapiens
  misc_feature (61)..(62): /note="This region represents a CpG dinucleotide"
  misc_feature (61)..(61): /note="Nucleotide may be methylated to form 5-methylcytosine"
aggatttcttaaacaaaacttccaagcaaaaatactgtaaggcacacgcacacacataaacgcacatacgtgcatatgattacataaaaaataatggtttctgttcaaaaaaagacatcatc

SEQ ID NO: 2437 - DNA, 122 bp, Homo sapiens
  misc_feature (61)..(62): /note="This region represents a CpG dinucleotide"
  misc_feature (61)..(61): /note="Nucleotide may be methylated to form 5-methylcytosine"
aaagaatgaaaaggtgatgcagttcattttccacagcattgaacactcatttgtcaccagcgtagaagggatttggggagagattaagcagtagcagtaatagtcaataatctgcgtctaaa

SEQ ID NO: 2438 - DNA, 122 bp, Homo sapiens
  misc_feature (61)..(62): /note="This region represents a CpG dinucleotide"
  misc_feature (61)..(61): /note="Nucleotide may be methylated to form 5-methylcytosine"
ctgataaaacttctgtacggattctacaaagctgccatggcaaacagcttcagtattcagcgtaacatatctgtctccatctcctgcatctgattgatacaggccctttggactgactggac

SEQ ID NO: 2439 - DNA, 122 bp, Homo sapiens
  misc_feature (61)..(62): /note="This region represents a CpG dinucleotide"
  misc_feature (61)..(61): /note="Nucleotide may be methylated to form 5-methylcytosine"
tacaggccttacggctctctgttgtttctcatcctctacaactaacacatcttggttggtcgctgggcctatgtatacattcaagtttggtttatccagactaactggctgagctgccctgc

SEQ ID NO: 2440 - DNA, 122 bp, Homo sapiens
  misc_feature (61)..(62): /note="This region represents a CpG dinucleotide"
  misc_feature (61)..(61): /note="Nucleotide may be methylated to form 5-methylcytosine"
aggtgttcacattcctgggtctttcagatctgtattcctcatgaaaataaaacctctctacgacacactgtgtccttgtgggtttttagttttactagggagtttttgtttccttttgcttc

SEQ ID NO: 2441 - DNA, 122 bp, Homo sapiens
  misc_feature (61)..(62): /note="This region represents a CpG dinucleotide"
  misc_feature (61)..(61): /note="Nucleotide may be methylated to form 5-methylcytosine"
attacgctgctaacgctgtacctctggcttggggctcacgcccagactcgcacccaggctcgcttgcgcccagagaaagagtaaagccatgttgaaactccctgcgattcctcgagtgtttt

SEQ ID NO: 2442 - DNA, 122 bp, Homo sapiens
  misc_feature (61)..(62): /note="This region represents a CpG dinucleotide"
  misc_feature (61)..(61): /note="Nucleotide may be methylated to form 5-methylcytosine"
aaggagaggctcgtggattgcaggccgtctacaccaaatgcgctctgcacggccccgtgacggaaacccaggctgctgagtcagacgtgaccggagaagacagccagcgttcagggacccga

SEQ ID NO: 2443 - DNA, 122 bp, Homo sapiens
  misc_feature (61)..(62): /note="This region represents a CpG dinucleotide"
  misc_feature (61)..(61): /note="Nucleotide may be methylated to form 5-methylcytosine"
gcttggaatctagagtggtccaaaggctgacttaattttacttgcagcacttcatccacgcgtttacattattctgattgcttgatcagatcatcgaacagactgtaagaatataagaaatt

SEQ ID NO: 2444 - DNA, 122 bp, Homo sapiens
  misc_feature (61)..(62): /note="This region represents a CpG dinucleotide"
  misc_feature (61)..(61): /note="Nucleotide may be methylated to form 5-methylcytosine"
ctggccgctccgaggagtcttcgcgccccgctgccccacgctgagggcatcgaaatccagcgtcttgctctcgaaggcgccctccacgttgcagaacatgccgccgtatttctgccgcggga

SEQ ID NO: 2445 - DNA, 122 bp, Homo sapiens
  misc_feature (61)..(62): /note="This region represents a CpG dinucleotide"
  misc_feature (61)..(61): /note="Nucleotide may be methylated to form 5-methylcytosine"
ccacttaattataagctatgtgactatggataaatcaaattctctctctgaatctcatttcgtcaactgtaaactgaaggagttggacaaggtgatcttgaaaatatctgcattctgtgtaa

SEQ ID NO: 2446 - DNA, 122 bp, Homo sapiens
  misc_feature (61)..(62): /note="This region represents a CpG dinucleotide"
  misc_feature (61)..(61): /note="Nucleotide may be methylated to form 5-methylcytosine"
gcaggaatcctgacaggagcaggctgcctttcagctccaagttcctggcactaagttctgcgcaggggcctgggcgaggtctttatgactttccagaggcttccaggtctctattgaaatgc

SEQ ID NO: 2447 - DNA, 122 bp, Homo sapiens
  misc_feature (61)..(62): /note="This region represents a CpG dinucleotide"
  misc_feature (61)..(61): /note="Nucleotide may be methylated to form 5-methylcytosine"
ccgacaccagcacctattggcatcttcttcattaacaagatgttttctaaccaagcaggtcggtcacaaggacttgaagccgccacagtgtttttgaaaaaggagtgacaaaggctaaggga

SEQ ID NO: 2448 - DNA, 122 bp, Homo sapiens
  misc_feature (61)..(62): /note="This region represents a CpG dinucleotide"
  misc_feature (61)..(61): /note="Nucleotide may be methylated to form 5-methylcytosine"
cattcttctcttagcctccttcattaagaccttattcaaatttggatcatggttctgctgcgacatccacgccattatcatctaaatagcaattacatattcaaacacaacagcttctcctt

SEQ ID NO: 2449 - DNA, 122 bp, Homo sapiens
  misc_feature (61)..(62): /note="This region represents a CpG dinucleotide"
  misc_feature (61)..(61): /note="Nucleotide may be methylated to form 5-methylcytosine"
tttgctgtgcgctggtgaccaaactgagttaggaaagacagaacacacacatacgcaacacgtcatagaaagcaggtttattactcacagacaggcaatgagggacaacagaagcctaggat

SEQ ID NO: 2450 - DNA, 122 bp, Homo sapiens
  misc_feature (61)..(62): /note="This region represents a CpG dinucleotide"
  misc_feature (61)..(61): /note="Nucleotide may be methylated to form 5-methylcytosine"
acttccagggttgagccaagcatgtggaattccaagtcctctgtctaagcctgttggattcgtgtgtggcttgtttcccttagagccatgactttgggaagactgagtgtgttatcagacca

SEQ ID NO: 2451 - DNA, 122 bp, Homo sapiens
  misc_feature (61)..(62): /note="This region represents a CpG dinucleotide"
  misc_feature (61)..(61): /note="Nucleotide may be methylated to form 5-methylcytosine"
aataatctgtggcaggtactgagctaggcttccgggttgtagagctgcctaagtcctggccgctgcccttaggagctcacatcctaagaggggaggatgaagattaatctcctactcactgc

SEQ ID NO: 2452 - DNA, 122 bp, Homo sapiens
  misc_feature (61)..(62): /note="This region represents a CpG dinucleotide"
  misc_feature (61)..(61): /note="Nucleotide may be methylated to form 5-methylcytosine"
ctatatatatattaagctaaacatgaattcatactgatgtctcagactcgaatccattgccgcagggctcattcttgccttcctcttgcttatttgtgacttctttctctaacagggagaaa

SEQ ID NO: 2453 - DNA, 122 bp, Homo sapiens
  misc_feature (61)..(62): /note="This region represents a CpG dinucleotide"
  misc_feature (61)..(61): /note="Nucleotide may be methylated to form 5-methylcytosine"
tgagcttggagcttttaaaaaactcatttaattagctccctggcagggctcaatcttacacgcaatgtccaagactctctgcagcacctccgcaggagagaatctttgggacagctgtggac

SEQ ID NO: 2454 - DNA, 122 bp, Homo sapiens
  misc_feature (61)..(62): /note="This region represents a CpG dinucleotide"
  misc_feature (61)..(61): /note="Nucleotide may be methylated to form 5-methylcytosine"
taataaccaaaaactttaaaagtgcccatcaagagttgaatggataaattaataatactacgcagtaataaaaagaattgtggatacatgcaagaacatggatgattctcaaaaacattctt

SEQ ID NO: 2455 - DNA, 122 bp, Homo sapiens
  misc_feature (61)..(62): /note="This region represents a CpG dinucleotide"
  misc_feature (61)..(61): /note="Nucleotide may be methylated to form 5-methylcytosine"
gattttgacagaactcactttccatgtctaatttgatgctaatttaatctgttcctctcccgctgacatgacctttcttgattgagtttcactgaggaaattttttgatggattgatttatc

SEQ ID NO: 2456 - DNA, 122 bp, Homo sapiens
  misc_feature (61)..(62): /note="This region represents a CpG dinucleotide"
  misc_feature (61)..(61): /note="Nucleotide may be methylated to form 5-methylcytosine"
aaaaaatgtgccttgctagggtggggacacttggttgatgcagtctctctctctctttctcggtgtttataacaaaacaaaaccaaaatgaactgaggggtttgtaatggtagtttgtttgt

SEQ ID NO: 2457 - DNA, 122 bp, Homo sapiens
  misc_feature (61)..(62): /note="This region represents a CpG dinucleotide"
  misc_feature (61)..(61): /note="Nucleotide may be methylated to form 5-methylcytosine"
tggaatctggaatctgggactggcttgctgggtggcttcagctcagcctcatgaggttgccgtcaggccatgggctggagtcgctgtcttcccagggctgtagaatctgctttcagggtgac

SEQ ID NO: 2458 - DNA, 122 bp, Homo sapiens
  misc_feature (61)..(62): /note="This region represents a CpG dinucleotide"
  misc_feature (61)..(61): /note="Nucleotide may be methylated to form 5-methylcytosine"
agaacatagtaatgatttgtttcgaatattgtacatacttgcatatcctgcaagaagccacggcaagaagcggcttcacagtgctttaatgtctcctcagtgtcttaatgctgcttccccaa

SEQ ID NO: 2459 - DNA, 122 bp, Homo sapiens
  misc_feature (61)..(62): /note="This region represents a CpG dinucleotide"
  misc_feature (61)..(61): /note="Nucleotide may be methylated to form 5-methylcytosine"
gagaggccaagaatctgaacagacaggccctgctgggtttccatactcagtctattaggtcgtactctttttgtccaatcacatttctacacagttgaccatgctttgttcatgcctatcca

SEQ ID NO: 2460 - DNA, 122 bp, Homo sapiens
  misc_feature (61)..(62): /note="This region represents a CpG dinucleotide"
  misc_feature (61)..(61): /note="Nucleotide may be methylated to form 5-methylcytosine"
aatatatgaccttcctctaggaattctcgactggcaagggaaaaatgcctcaaatgagcacgcgcacaacttcagtaaacacactgtgagtgcggccactcccaagtgctggcagaccactg

SEQ ID NO: 2461 - DNA, 122 bp, Homo sapiens
  misc_feature (61)..(62): /note="This region represents a CpG dinucleotide"
  misc_feature (61)..(61): /note="Nucleotide may be methylated to form 5-methylcytosine"
tggggaggaagggatagtttttcccaggtctggagattaaacaacttaataggcatttcacgttccgctcacaaaaaggggatttgcatatgaacttgtttcggcaagaaaacacatctgaa

SEQ ID NO: 2462 - DNA, 122 bp, Homo sapiens
  misc_feature (61)..(62): /note="This region represents a CpG dinucleotide"
  misc_feature (61)..(61): /note="Nucleotide may be methylated to form 5-methylcytosine"
atcggcccgcctcggcttcccaaagtgctaggattacaggcatgaaccacggtgcctggccgaccctgtcttaagaaagaaagaaaggagagagagagaagaaagaaaagaaaaacagttca

SEQ ID NO: 2463 - DNA, 122 bp, Homo sapiens
  misc_feature (61)..(62): /note="This region represents a CpG dinucleotide"
  misc_feature (61)..(61): /note="Nucleotide may be methylated to form 5-methylcytosine"
caggacccgctcctgcacgcggcgtggctcaaggcggtggcctcaggtcctcggtgttgacgccctgcgatgcctccctggtagtaccctgtgccttctgctctgaggccgctgcggtgccc

SEQ ID NO: 2464 - DNA, 122 bp, Homo sapiens
  misc_feature (61)..(62): /note="This region represents a CpG dinucleotide"
  misc_feature (61)..(61): /note="Nucleotide may be methylated to form 5-methylcytosine"
atcttgcaggcctcgcggcgtcgttcttcgttgtggcggcctgtggctctttgaaaaacacgacgaggcctgcaaaatgcgtttttctttttttcctttacgcatgtaaccacggtcctgca

SEQ ID NO: 2465 - DNA, 122 bp, Homo sapiens
  misc_feature (61)..(62): /note="This region represents a CpG dinucleotide"
  misc_feature (61)..(61): /note="Nucleotide may be methylated to form 5-methylcytosine"
accaagatccccattctagatgatcttgaccttctgatagaaaagaaccctctaatttcacgttttctatctggcctagatgaaattatgggatacttttggacatgggtatcctttgttct

SEQ ID NO: 2466 - DNA, 122 bp, Homo sapiens
  misc_feature (61)..(62): /note="This region represents a CpG dinucleotide"
  misc_feature (61)..(61): /note="Nucleotide may be methylated to form 5-methylcytosine"
gataagatcatatgcttttaaatgtcattctcccaaagtctataacctcttttaaacatgcgatacttttcatgtcctccaataaacagcaaaacagtgcaaaggcgtggaaaatgcagtgt

SEQ ID NO: 2467 - DNA, 122 bp, Homo sapiens
  misc_feature (61)..(62): /note="This region represents a CpG dinucleotide"
  misc_feature (61)..(61): /note="Nucleotide may be methylated to form 5-methylcytosine"
tcgtccacgcccacaacagagaggtggccccggtagggccttgatttctccaaccgtaagcgagccgcggtgtgggtgactgcagtagggcaaactcggtgcggtgaaggcttggttcaatc

SEQ ID NO: 2468 - DNA, 122 bp, Homo sapiens
  misc_feature (61)..(62): /note="This region represents a CpG dinucleotide"
  misc_feature (61)..(61): /note="Nucleotide may be methylated to form 5-methylcytosine"
caccttcagatagagctgcctttccgttgtccgtggaattcactgcacatttcgagggaccgcctgtcctggcagagagcaagggactcataaaagtgtcagaacattatgaacagcccgaa

SEQ ID NO: 2469 - DNA, 122 bp, Homo sapiens
  misc_feature (61)..(62): /note="This region represents a CpG dinucleotide"
  misc_feature (61)..(61): /note="Nucleotide may be methylated to form 5-methylcytosine"
gggacgcggcagcaaggcgtggagagagcccccgggggcgtcccatgaggcgttcgggatcggcgcctcctaggtgcgggctgtgcgggcagtcctgctcccgcccccggggctgagctggc

SEQ ID NO: 2470 - DNA, 122 bp, Homo sapiens
  misc_feature (61)..(62): /note="This region represents a CpG dinucleotide"
  misc_feature (61)..(61): /note="Nucleotide may be methylated to form 5-methylcytosine"
ctcctccccctttaaatcaatccccacttgccttccgaactctcaaacttcaggatttcacgctagtgccatgggcaggaatccaaagtatttatttaagacatatttgacacatacatatc

SEQ ID NO: 2471 - DNA, 122 bp, Homo sapiens
  misc_feature (61)..(62): /note="This region represents a CpG dinucleotide"
  misc_feature (61)..(61): /note="Nucleotide may be methylated to form 5-methylcytosine"
gcttagttaaatctctgttttcaccgttttgtaattgagaaaggcatccgcagcagaagccgatttttcagtcggcttccttttgtttaacatagaaagtacctgtattaattttgatgaat

SEQ ID NO: 2472 - DNA, 122 bp, Homo sapiens
  misc_feature (61)..(62): /note="This region represents a CpG dinucleotide"
  misc_feature (61)..(61): /note="Nucleotide may be methylated to form 5-methylcytosine"
tctcgtcaacagatctccagaggtggtgcagaaacgaccccgcgccggcgccccatcctgcggccagtgcctccgcgccccggctccggtccccaccgtccccgccccagatttccggagga

SEQ ID NO: 2473 - DNA, 122 bp, Homo sapiens
  misc_feature (61)..(62): /note="This region represents a CpG dinucleotide"
  misc_feature (61)..(61): /note="Nucleotide may be methylated to form 5-methylcytosine"
ctcgccctagctcctctgtctctacctgtctgcctatgaaacagttcaaaactaatatggcgcaatggatggtattatagacttcccacctccctggccagacttcttgggttcaaagtttg

SEQ ID NO: 2474 - DNA, 122 bp, Homo sapiens
  misc_feature (61)..(62): /note="This region represents a CpG dinucleotide"
  misc_feature (61)..(61): /note="Nucleotide may be methylated to form 5-methylcytosine"
aggtcaagaagaactgtaaatcttcttttatgacgtttccaatgggagagcctagttctacggataagagagtggaactattgggttggttatcattctgaaatcagtattcccttttatag

SEQ ID NO: 2475 - DNA, 122 bp, Homo sapiens
  misc_feature (61)..(62): /note="This region represents a CpG dinucleotide"
  misc_feature (61)..(61): /note="Nucleotide may be methylated to form 5-methylcytosine"
gttcccaagcttcttcaacattttcaggtatctttatagcaacaccccacttctcagtatcgattttctgttagtgcatttttgcatcgctataaagatataccagagactaggtaatttgt

SEQ ID NO: 2476 - DNA, 122 bp, Homo sapiens
  misc_feature (61)..(62): /note="This region represents a CpG dinucleotide"
  misc_feature (61)..(61): /note="Nucleotide may be methylated to form 5-methylcytosine"
caggcagcagcaccagcaggctcagctccttcctggcgtagggcagctccagcagctgcgcgcgcacctcgcccacgtgggcgagcttaaacgtggcctcctgatacatcatctgcactggc

SEQ ID NO: 2477 - DNA, 122 bp, Homo sapiens
  misc_feature (61)..(62): /note="This region represents a CpG dinucleotide"
  misc_feature (61)..(61): /note="Nucleotide may be methylated to form 5-methylcytosine"
tcaatgaacttgcagagaaagatgtgcaaggatgaagattaattgggagaatatagaaagcggtcaagcaaaaggtggtaagattaactaggatcctaatgaagcatcaataaaaagcgacc

SEQ ID NO: 2478 - DNA, 122 bp, Homo sapiens
  misc_feature (61)..(62): /note="This region represents a CpG dinucleotide"
  misc_feature (61)..(61): /note="Nucleotide may be methylated to form 5-methylcytosine"
gcgcttgcagcatgaggagaaaatgaaatcttgatactacagttttgtaagatattgaagcgaagttcccatgtcttaaataaaacagcaaaatgtgaaagactcaaagctgttgttacaag

SEQ ID NO: 2479 - DNA, 122 bp, Homo sapiens
  misc_feature (61)..(62): /note="This region represents a CpG dinucleotide"
  misc_feature (61)..(61): /note="Nucleotide may be methylated to form 5-methylcytosine"
tgcccaaggtcatacttggagctggtattccagtttagttctttccacttcacaactctgcgtaaaagagtatcttgttataaatcccagtcacttctcagaacctctttccaagaaccgtt

SEQ ID NO: 2480 - DNA, 122 bp, Homo sapiens
  misc_feature (61)..(62): /note="This region represents a CpG dinucleotide"
  misc_feature (61)..(61): /note="Nucleotide may be methylated to form 5-methylcytosine"
gctcccggactgtaccagacactgaatgtattcactgaatgcactatttcttgaaatgatcgtaaatcacctgattataacaactgttttaaaagtgttctctctctctctctcaggaatag

SEQ ID NO: 2481 - DNA, 122 bp, Homo sapiens
  misc_feature (61)..(62): /note="This region represents a CpG dinucleotide"
  misc_feature (61)..(61): /note="Nucleotide may be methylated to form 5-methylcytosine"
agcctgcaacctcatccctgctttatttacctccaaggcacttaccaccttctagcttgccgtgtataggttgagtattctttattccagaatgcttgggaccagaagtgtttcagattttg

SEQ ID NO: 2482 - DNA, 122 bp, Homo sapiens
  misc_feature (61)..(62): /note="This region represents a CpG dinucleotide"
  misc_feature (61)..(61): /note="Nucleotide may be methylated to form 5-methylcytosine"
ggccggtttgcactcaggaggcagagtgctgcttacaggcccagggtcacagccttggtgcgtgtggaccacttgatttgaccttactccatgactgctgtccttgcagaagtgtgtggtta

SEQ ID NO: 2483 - DNA, 122 bp, Homo sapiens
  misc_feature (61)..(62): /note="This region represents a CpG dinucleotide"
  misc_feature (61)..(61): /note="Nucleotide may be methylated to form 5-methylcytosine"
aaaagagttactagtgattgagttcaatcacatggccaatgatttaatcaaccatgcctacgtaataagctctttttgtttgttttttgagatggagtctcactccttttgcccaggatgga

SEQ ID NO: 2484 - DNA, 122 bp, Homo sapiens
  misc_feature (61)..(62): /note="This region represents a CpG dinucleotide"
  misc_feature (61)..(61): /note="Nucleotide may be methylated to form 5-methylcytosine"
gtgtgtgtcaggcaccttgctgggagccttccttggattacctcaatgctgtccttaggacggtatcacaagacaagtgctgttattcccattttatagacaaggaaactaggagtaggaga

SEQ ID NO: 2485 - DNA, 122 bp, Homo sapiens
  misc_feature (61)..(62): /note="This region represents a CpG dinucleotide"
  misc_feature (61)..(61): /note="Nucleotide may be methylated to form 5-methylcytosine"
ccgtacaagaccagcataggcacctctatcatctcaggatattgcacaatgaggaagtcacgcacaccatgtccagcttgaccatggcagggaaagtgtctgaccaagaagaggagatgaga

SEQ ID NO: 2486 - DNA, 122 bp, Homo sapiens
  misc_feature (61)..(62): /note="This region represents a CpG dinucleotide"
  misc_feature (61)..(61): /note="Nucleotide may be methylated to form 5-methylcytosine"
aactcgaatgttcctcacttggcaggtcctcagcgcccgacaagtcaggttccaactccacggtgggtcctcagagccaagcagcccagcagccatgccagccccagactctgccgccaacc

SEQ ID NO: 2487 - DNA, 122 bp, Homo sapiens
  misc_feature (61)..(62): /note="This region represents a CpG dinucleotide"
  misc_feature (61)..(61): /note="Nucleotide may be methylated to form 5-methylcytosine"
agagagaatgcctaacaggaactgcagtcagagaaaagcagccgctgctaggaatgtgaccgtgcagggagagaaaatgaatacatctcctcatctctctatcctcccaccgtctcatctcc

SEQ ID NO: 2488 - DNA, 122 bp, Homo sapiens
  misc_feature (61)..(62): /note="This region represents a CpG dinucleotide"
  misc_feature (61)..(61): /note="Nucleotide may be methylated to form 5-methylcytosine"
aagcagtgcaatgaagcttgaatagatcagaagaaactaaaaccccagctcggtagatgccgatactggtttgcatggaggagttattttgctaaaaggaagtaaaaccgcttcgtgaaatg

SEQ ID NO: 2489 - DNA, 122 bp, Homo sapiens
  misc_feature (61)..(62): /note="This region represents a CpG dinucleotide"
  misc_feature (61)..(61): /note="Nucleotide may be methylated to form 5-methylcytosine"
caaggttttaaacttgcaaaaaaattcttcgacttttcaaatgcaggaatattgaaacatcggtacacttggactttcaggaaattgtccttgccaggaatgtacactaactaccccgactg

SEQ ID NO: 2490 - DNA, 122 bp, Homo sapiens
  misc_feature (61)..(62): /note="This region represents a CpG dinucleotide"
  misc_feature (61)..(61): /note="Nucleotide may be methylated to form 5-methylcytosine"
tctgttcaatcatttcaattccctgcagtgtgaaatatgaacttgccaacaaatggccagcgtgctgtgcctcgcagcagggggggaagtgccacagctgtgccagagactggaaaactcaa

SEQ ID NO: 2491 - DNA, 122 bp, Homo sapiens
  misc_feature (61)..(62): /note="This region represents a CpG dinucleotide"
  misc_feature (61)..(61): /note="Nucleotide may be methylated to form 5-methylcytosine"
tggacagaaggctgtgactaactttattggcatctctctagagacataagtaggcttcaccgccaatttgcctaaggtgttcagcaggactattgaaggcctggcagctgccggaggagagc

SEQ ID NO: 2492 - DNA, 122 bp, Homo sapiens
  misc_feature (61)..(62): /note="This region represents a CpG dinucleotide"
  misc_feature (61)..(61): /note="Nucleotide may be methylated to form 5-methylcytosine"
agcactgtcagcagctccacacacactgggtggcgcaggtgggagaagagtctgagagcccggggagacttcagggccagaggctcgcccagccccagcacatggtagtatacctaagagag

SEQ ID NO: 2493 - DNA, 122 bp, Homo sapiens
  misc_feature (61)..(62): /note="This region represents a CpG dinucleotide"
  misc_feature (61)..(61): /note="Nucleotide may be methylated to form 5-methylcytosine"
taaattattcttctgggttcaggctgactgtctcgctatctcttaaaatctgtgttgttacgaacaaacaatcatctaaggcatttatgagtcgtgagctgtaatgttgttaaaactgaatc

SEQ ID NO: 2494 - DNA, 122 bp, Homo sapiens
  misc_feature (61)..(62): /note="This region represents a CpG dinucleotide"
  misc_feature (61)..(61): /note="Nucleotide may be methylated to form 5-methylcytosine"
gtcatatgaatcttattcccttgcttacccaacaggaggcatttctgtgataaactccagcgctgtttctttctttggcttttttattatgctttggcatctcatctagtccatgtgcagta

SEQ ID NO: 2495 - DNA, 122 bp, Homo sapiens
  misc_feature (61)..(62): /note="This region represents a CpG dinucleotide"
  misc_feature (61)..(61): /note="Nucleotide may be methylated to form 5-methylcytosine"
gtgtggcactaacagtaccgatagtactactactaataattgcccgagaggtctgctatccgttaactgacactcggtagcggccgctgcggaatttcgaattgcgggaaacccgcagactt

SEQ ID NO: 2496 - DNA, 122 bp, Homo sapiens
  misc_feature (61)..(62): /note="This region represents a CpG dinucleotide"
  misc_feature (61)..(61): /note="Nucleotide may be methylated to form 5-methylcytosine"
tcttctaagatatttgctcatcgacgtgaaagatttttataaaacaatcctaacacatttcgctgacaaaatttttcatcatgatgagttgaaaaagatgtaagtcctagtgtgttctcaat

SEQ ID NO: 2497 - DNA, 122 bp, Homo sapiens
  misc_feature (61)..(62): /note="This region represents a CpG dinucleotide"
  misc_feature (61)..(61): /note="Nucleotide may be methylated to form 5-methylcytosine"
ttaggaggccctattctaagtgcttgctaagattatctcatttaatcctcacaacacttccgctatgtagcaggtgctgttattatctccgtgatggggaaactgaagcacagagagggtta

SEQ ID NO: 2498 - DNA, 122 bp, Homo sapiens
  misc_feature (61)..(62): /note="This region represents a CpG dinucleotide"
  misc_feature (61)..(61): /note="Nucleotide may be methylated to form 5-methylcytosine"
aggataaaagaaagatgtaagtttttttctctcgccctgctctgcttatcacagaagctccgtatcaagatgacagagctcagcctggtactggtacaaaaacagactcatagaccaatgga

SEQ ID NO: 2499 - DNA, 122 bp, Homo sapiens
  misc_feature (61)..(62): /note="This region represents a CpG dinucleotide"
  misc_feature (61)..(61): /note="Nucleotide may be methylated to form 5-methylcytosine"
aaatctctagtgccttctttttattctcgcctgtagaatttctcctaatgcttttagatacggcaattccactttctaaaatcctttcatgatatccccttctttccacgtttgtcagaaat

SEQ ID NO: 2500 - DNA, 122 bp, Homo sapiens
  misc_feature (61)..(62): /note="This region represents a CpG dinucleotide"
  misc_feature (61)..(61): /note="Nucleotide may be methylated to form 5-methylcytosine"
gcttaaagatatcctttgttgagcacctgccatatggcagacggtgtaaaaggtgctttacggtcctggtgtcatggaaagccttccaacaaccttatgatagaggtattattatcttcatt

SEQ ID NO: 2501 - DNA, 122 bp, Homo sapiens
  misc_feature (61)..(62): /note="This region represents a CpG dinucleotide"
  misc_feature (61)..(61): /note="Nucleotide may be methylated to form 5-methylcytosine"
aacactaaaatttcaaatgtggcctaggtgtcttctatgtattctcattctttgcaggtgcgacacagagtttgtgaattaatattagtggaatgaaaaacggaatgagtaaggcctcatgc

SEQ ID NO: 2502 - DNA, 122 bp, Homo sapiens
  misc_feature (61)..(62): /note="This region represents a CpG dinucleotide"
  misc_feature (61)..(61): /note="Nucleotide may be methylated to form 5-methylcytosine"
ttgttttggtaaacaccttcacggccgcctggctctccttcccccgctcccattcggaatcgctctggccttataaatccgtgcgtcgtcatcataagggcagtgatcctggcagcgctgat

SEQ ID NO: 2503 - DNA, 122 bp, Homo sapiens
  misc_feature (61)..(62): /note="This region represents a CpG dinucleotide"
  misc_feature (61)..(61): /note="Nucleotide may be methylated to form 5-methylcytosine"
acatgcatagagggaagacaatgtgcagacacagggggaagccatctacaagccaaggagcgaggctccacgagaaaccaaccatgctgacaccccgatcttggatgtctagtctccagatg

SEQ ID NO: 2504 - DNA, 122 bp, Homo sapiens
  misc_feature (61)..(62): /note="This region represents a CpG dinucleotide"
  misc_feature (61)..(61): /note="Nucleotide may be methylated to form 5-methylcytosine"
acagccagccaccggaattgctccctcttactaaagctgactgtttctcatagttggcagcgtactcgatgaaatgttctgcgtctcagatactgttttatgtggtcctcctctgtgccaac

SEQ ID NO: 2505 - DNA, 122 bp, Homo sapiens
  misc_feature (61)..(62): /note="This region represents a CpG dinucleotide"
  misc_feature (61)..(61): /note="Nucleotide may be methylated to form 5-methylcytosine"
ctctaggccaggctgtttccacacctatgacccggtgttaaaaccaggcccatgtgtgaccgtgtgggccacagaatataaagtagacaccccgtttttttggattgtttcctaatgttcat

SEQ ID NO: 2506 - DNA, 122 bp, Homo sapiens
  misc_feature (61)..(62): /note="This region represents a CpG dinucleotide"
  misc_feature (61)..(61): /note="Nucleotide may be methylated to form 5-methylcytosine"
tcccacccaccacctcccaccaagacgcatctccagctcctgagtcgacctgcagtacagcgttattagtctttttatttgcttattgcatcttgggagcgcgtgggtgggtgaagggagcg

SEQ ID NO: 2507 - DNA, 122 bp, Homo sapiens
  misc_feature (61)..(62): /note="This region represents a CpG dinucleotide"
  misc_feature (61)..(61): /note="Nucleotide may be methylated to form 5-methylcytosine"
tttcctttggcagcgtgtttccttttccgagtatgtgctgttaaactagattggccggttcgctttccatttcctgacacttgacatggaatgcctttgaccattggtgctctgacagagaa

SEQ ID NO: 2508 - DNA, 122 bp, Homo sapiens
  misc_feature (61)..(62): /note="This region represents a CpG dinucleotide"
  misc_feature (61)..(61): /note="Nucleotide may be methylated to form 5-methylcytosine"
cacctaaacgtagtaaagagcatgaatgacatttgaggtatctgcaacctcaaagtgacacgaaaacatctggatttctgttggtgacaaagtcacaggtgctactgatatgactgtggttt

SEQ ID NO: 2509 - DNA, 122 bp, Homo sapiens
  misc_feature (61)..(62): /note="This region represents a CpG dinucleotide"
  misc_feature (61)..(61): /note="Nucleotide may be methylated to form 5-methylcytosine"
ctcagccataaactttatcacctggcctcatgccttcggctttgtccttgattttggaagcgcagtgaatcaacattatttatctttgcagaaggcagtatcttaaccaccacatagtagca

SEQ ID NO: 2510 - DNA, 122 bp, Homo sapiens
  misc_feature (61)..(62): /note="This region represents a CpG dinucleotide"
  misc_feature (61)..(61): /note="Nucleotide may be methylated to form 5-methylcytosine"
ctcaagcgatccacccatctcagcctcctgagtagctgggattacaggcacacaccaccacgcctggctcattgttgtattttttgtagaggcagggtctccccatgttgcccaggctggtc

SEQ ID NO: 2511 - DNA, 122 bp, Homo sapiens
  misc_feature (61)..(62): /note="This region represents a CpG dinucleotide"
  misc_feature (61)..(61): /note="Nucleotide may be methylated to form 5-methylcytosine"
atttaacgtatattcattgacttcataaccaatcttttggtacaactggaacccctccagcgaccttttcaaactattgcctctggtctatttaaatgtattggggaccacatggagacttc

SEQ ID NO: 2512 - DNA, 122 bp, Homo sapiens
  misc_feature (61)..(62): /note="This region represents a CpG dinucleotide"
  misc_feature (61)..(61): /note="Nucleotide may be methylated to form 5-methylcytosine"
tgaagatttaactattttgatgtgtgttattaaaaacagaagcttaaaccttaaaagtgacgcatgagtaaaatcaccttctgtcacttggatagaaaacgcaaatgggcttttttcctcca

SEQ ID NO: 2513 - DNA, 122 bp, Homo sapiens
  misc_feature (61)..(62): /note="This region represents a CpG dinucleotide"
  misc_feature (61)..(61): /note="Nucleotide may be methylated to form 5-methylcytosine"
atgaaatcttatgccctggaacgtgaatcatccctttgtccagcatatccacactggagacgctccctgccggttagtcccttactagccatctgtattagttgttttcacactgctgataa

SEQ ID NO: 2514 - DNA, 122 bp, Homo sapiens
  misc_feature (61)..(62): /note="This region represents a CpG dinucleotide"
  misc_feature (61)..(61): /note="Nucleotide may be methylated to form 5-methylcytosine"
taagttgtattctgtgcataaattatttccatgtcttctctcccttttaaaggtgtgccacgtcatcaccgaggtgaaatctggaaatttctagctgagcaattccaccttaaacaccagtt

SEQ ID NO: 2515 - DNA, 122 bp, Homo sapiens
  misc_feature (61)..(62): /note="This region represents a CpG dinucleotide"
  misc_feature (61)..(61): /note="Nucleotide may be methylated to form 5-methylcytosine"
ccatttgcaagcctagcctccactggggagaagtctgttctcagagtgaggagctctgcacgcgttggctaaaagggtggcgtggctttgtgaaattgagagctggaggagcccagcagaat

SEQ ID NO: 2516 - DNA, 122 bp, Homo sapiens
  misc_feature (61)..(62): /note="This region represents a CpG dinucleotide"
  misc_feature (61)..(61): /note="Nucleotide may be methylated to form 5-methylcytosine"
atagaaacagaaagtgcctttgtaccaattactaggcactaatttacgctcttcagtgggcgctgggcttgctggagaaacattaggaaaaggtgggagggtcggatgtgggggaggattct

SEQ ID NO: 2517 - DNA, 122 bp, Homo sapiens
  misc_feature (61)..(62): /note="This region represents a CpG dinucleotide"
  misc_feature (61)..(61): /note="Nucleotide may be methylated to form 5-methylcytosine"
gctgcaaggcttaaatgaggtaaaatcacattcgtggttcatcacatgggcttaagcttccgacagctctgaatttggaaccatgctctgtaactattagctggccttggcagaatactaaa

SEQ ID NO: 2518 - DNA, 122 bp, Homo sapiens
  misc_feature (61)..(62): /note="This region represents a CpG dinucleotide"
  misc_feature (61)..(61): /note="Nucleotide may be methylated to form 5-methylcytosine"
aaaatccagggagtgaggctgaaacaatcctctgtgctgcccagaggtagggctcaaacacgggaccaaattgaggactggctaaaacaggtctggagtgggaacagctttccataagacac

SEQ ID NO: 2519 - DNA, 122 bp, Homo sapiens
  misc_feature (61)..(62): /note="This region represents a CpG dinucleotide"
  misc_feature (61)..(61): /note="Nucleotide may be methylated to form 5-methylcytosine"
aaatccaggagtagaaattgcaggattgtagggtaagtgtgtttatagtttttaaagtaacggcctattttgcattcccactggcaatgcatgagaattccagggctccaaatccttgttga

SEQ ID NO: 2520 - DNA, 122 bp, Homo sapiens
  misc_feature (61)..(62): /note="This region represents a CpG dinucleotide"
  misc_feature (61)..(61): /note="Nucleotide may be methylated to form 5-methylcytosine"
agctggaccacacccagccaggactacacgtgcaggtagtacacaggaattgggaatgtgcgtttgggctggcagtattgctctgtgtggttggcagaaggaggcaccattcacattgaaaa

SEQ ID NO: 2521 - DNA, 122 bp, Homo sapiens
  misc_feature (61)..(62): /note="This region represents a CpG dinucleotide"
  misc_feature (61)..(61): /note="Nucleotide may be methylated to form 5-methylcytosine"
cctcttcaaacaggacagagctcacacccctttccaggtaaaggtgtgtgtgtgtgtgtacgtgcacgcacgcgcgcgctgatggcaatgtcggctgcctcactcattctattcctagtcca

SEQ ID NO: 2522 - DNA, 122 bp, Homo sapiens
  misc_feature (61)..(62): /note="This region represents a CpG dinucleotide"
  misc_feature (61)..(61): /note="Nucleotide may be methylated to form 5-methylcytosine"
catttatttatttatttattttttaagaggcaggatctcactatgttgctcaagctaggacgcagtggctattcacaggcacaatccaactattgaccaccacggagttttgacctactcca

SEQ ID NO: 2523 - DNA, 122 bp, Homo sapiens
  misc_feature (61)..(62): /note="This region represents a CpG dinucleotide"
  misc_feature (61)..(61): /note="Nucleotide may be methylated to form 5-methylcytosine"
aaagcatgtttttgtccaaaacaagccagctgttactggtctcgctgtttgtggtctcatcgcacggggtcctgagttgctggcaccatgcgagccgcctaatttattgctagtgaggcaag

SEQ ID NO: 2524 - DNA, 122 bp, Homo sapiens
  misc_feature (61)..(62): /note="This region represents a CpG dinucleotide"
  misc_feature (61)..(61): /note="Nucleotide may be methylated to form 5-methylcytosine"
cctgtagttcaacgagcaggagcatgttacaactctctcctgtagtctagcgagcgggagcgtgttacggctcttttattcccgctgcccatagcttggcgagctgcccaggggtgtcacag

SEQ ID NO: 2525 - DNA, 122 bp, Homo sapiens
  misc_feature (61)..(62): /note="This region represents a CpG dinucleotide"
  misc_feature (61)..(61): /note="Nucleotide may be methylated to form 5-methylcytosine"
cttacatttttaaaagaaagcatttatgagcaagttcaaacttaacctaaacctgtgtctcgtctcatctcgtctcatctcttttcttttctttctttttttttttgagacagagtcttgct

SEQ ID NO: 2526 - DNA, 122 bp, Homo sapiens
  misc_feature (61)..(62): /note="This region represents a CpG dinucleotide"
  misc_feature (61)..(61): /note="Nucleotide may be methylated to form 5-methylcytosine"
acaactgaaattgaaatataaactgtctattggctaatactgcattggctagtactgcatcgatattaaatctcttgggtatgaaaatggcactgatgtcatgaagaatggctttgttctta

SEQ ID NO: 2527 - DNA, 122 bp, Homo sapiens
  misc_feature (61)..(62): /note="This region represents a CpG dinucleotide"
  misc_feature (61)..(61): /note="Nucleotide may be methylated to form 5-methylcytosine"
acatacggtggatcccagtaaacacaatgggccttagtgagcacattcctttcctttttacgacatactcatggggagatgcctgcagccgcaccaacaaaaaaggagtacctggggccagg

SEQ ID NO: 2528 - DNA, 122 bp, Homo sapiens
  misc_feature (61)..(62): /note="This region represents a CpG dinucleotide"
  misc_feature (61)..(61): /note="Nucleotide may be methylated to form 5-methylcytosine"
cccaacttcaaactatgaggctatagtcaccaaaacccatggtactggtataaagataggcgtatagaccaatggaacagaacagagaacccagaaataaacccaaatacttacagccaact

SEQ ID NO: 2529 - DNA, 122 bp, Homo sapiens
  misc_feature (61)..(62): /note="This region represents a CpG dinucleotide"
  misc_feature (61)..(61): /note="Nucleotide may be methylated to form 5-methylcytosine"
tttttgcttctgcctcatttttctctggccgccgccatataagacgtgactttggcctcccgttatgattctgagacctccccagccatggagaactgtaagtccaatgaaacctctttttt

SEQ ID NO: 2530 - DNA, 122 bp, Homo sapiens
  misc_feature (61)..(62): /note="This region represents a CpG dinucleotide"
  misc_feature (61)..(61): /note="Nucleotide may be methylated to form 5-methylcytosine"
cagctttaaaggaggcttaattgttctgggagttttgctgacataatacagcttggctcacgggtggttcttgtccttaggcttaaaagtagaacaggcattaataaatgccacaaaatgtc

SEQ ID NO: 2531 - DNA, 122 bp, Homo sapiens
  misc_feature (61)..(62): /note="This region represents a CpG dinucleotide"
  misc_feature (61)..(61): /note="Nucleotide may be methylated to form 5-methylcytosine"
ccaccaggtaggcattgatgaagtgggccagcaggttacagccccacaagaaaaccacatcgcccaggaggtgagggattaatccactaaaaaacaaggtaagcagagatgagcaggagagg

SEQ ID NO: 2532 - DNA, 122 bp, Homo sapiens
  misc_feature (61)..(62): /note="This region represents a CpG dinucleotide"
  misc_feature (61)..(61): /note="Nucleotide may be methylated to form 5-methylcytosine"
atcagacagccacaccagaggccatgtttccagaagtgaaaaggagagggcatggagagccgcagaagacaagagcactgcagccgctgctgggacccgactgcactctgttccttctttgc

SEQ ID NO: 2533 - DNA, 122 bp, Homo sapiens
  misc_feature (61)..(62): /note="This region represents a CpG dinucleotide"
  misc_feature (61)..(61): /note="Nucleotide may be methylated to form 5-methylcytosine"
ttcctgatgagtgttatagctcttaaggtgatgtgtctggagttgttcattaccctttcacggtcttgctggcttcaagagtgaaactacagacctttgcagtgactgttacagctcacaag

SEQ ID NO: 2534 - DNA, 122 bp, Homo sapiens
  misc_feature (61)..(62): /note="This region represents a CpG dinucleotide"
  misc_feature (61)..(61): /note="Nucleotide may be methylated to form 5-methylcytosine"
cggggctgcccagagccaaagcagggtgggctccagagcaagaagccatcgtggacgcggcgtctgcgggaggaaagcagctccttctggcttcgcgaaggccgcctagtccaggagcccca

SEQ ID NO: 2535 - DNA, 122 bp, Homo sapiens
  misc_feature (61)..(62): /note="This region represents a CpG dinucleotide"
  misc_feature (61)..(61): /note="Nucleotide may be methylated to form 5-methylcytosine"
cgcaatgttacatccatcagattttccactgagttcgttcaaaagtgtgttatatatttacggtgtggaaaacactgcctgaactatttgagacataaaaagaatgaggcaagagctttgct

SEQ ID NO: 2536 - DNA, 122 bp, Homo sapiens
  misc_feature (61)..(62): /note="This region represents a CpG dinucleotide"
  misc_feature (61)..(61): /note="Nucleotide may be methylated to form 5-methylcytosine"
ggactttctctgtcagagtttggagaaaacactcatgcatttgattcacagccaggagtccgcttgccttttactgatcttctgtttgtcagcagtttccacattaagacagttgagtgagt

SEQ ID NO: 2537 - DNA, 122 bp, Homo sapiens
  misc_feature (61)..(62): /note="This region represents a CpG dinucleotide"
  misc_feature (61)..(61): /note="Nucleotide may be methylated to form 5-methylcytosine"
taacactcaccgcgaaggtccatggcttcgttcttgaagttgggaagaccaagaaccaaccggaaagaataaattccagacacaatactgttagacttcattgtcctcctgttaaacataaa

SEQ ID NO: 2538 - DNA, 122 bp, Homo sapiens
  misc_feature (61)..(62): /note="This region represents a CpG dinucleotide"
  misc_feature (61)..(61): /note="Nucleotide may be methylated to form 5-methylcytosine"
ttgcccgtgaggtggcaccaatgggccttgcctgcaccagctcgctcagaaacacaactgcgacaagatgatctgcctcaagggttatgctcacctgcatccctgtgccgtaactgccgcaa

SEQ ID NO: 2539 - DNA, 122 bp, Homo sapiens
  misc_feature (61)..(62): /note="This region represents a CpG dinucleotide"
  misc_feature (61)..(61): /note="Nucleotide may be methylated to form 5-methylcytosine"
gacggcagggccagtcacacaagacgtctcttgtgaggtcaggctggcactggtggtatccgtactgcgactccctgtatgtctactttcggcatccctggagaagaccaacgcacatacgc

SEQ ID NO: 2540 - DNA, 122 bp, Homo sapiens
  misc_feature (61)..(62): /note="This region represents a CpG dinucleotide"
  misc_feature (61)..(61): /note="Nucleotide may be methylated to form 5-methylcytosine"
cttttttaagacttcagctttgactgtccttacaagtggaaaacaacagctaattgagaacgctgttttcggtaagggggacactaaatggatctacaggagtagtggcacaactaaattta

SEQ ID NO: 2541 - DNA, 122 bp, Homo sapiens
  misc_feature (61)..(62): /note="This region represents a CpG dinucleotide"
  misc_feature (61)..(61): /note="Nucleotide may be methylated to form 5-methylcytosine"
aaaatgtacccaagcatttaatgagattattttaatgcagagcctacaaccactgtctatcgtggtgcaaacagctctccatgctaatcaaacgcctctcatctttttacaatgaattcatg

SEQ ID NO: 2542 - DNA, 122 bp, Homo sapiens
  misc_feature (61)..(62): /note="This region represents a CpG dinucleotide"
  misc_feature (61)..(61): /note="Nucleotide may be methylated to form 5-methylcytosine"
tgagagggaaataattttctggatgtgacagggggtctctaagagcaaccccaggttctgcgattcactaggagaactcacaggactcagcatatagttgtattcatggctaagatttacta

SEQ ID NO: 2543 - DNA, 122 bp, Homo sapiens
  misc_feature (61)..(62): /note="This region represents a CpG dinucleotide"
  misc_feature (61)..(61): /note="Nucleotide may be methylated to form 5-methylcytosine"
cataaaattaacagattttagtgattacatgtgagcctcagggcagataaagagagccagcgatagcacttaggattcttacttaagcaacttggtggaaatcacactgagaaaggaaacaa

SEQ ID NO: 2544 - DNA, 122 bp, Homo sapiens
  misc_feature (61)..(62): /note="This region represents a CpG dinucleotide"
  misc_feature (61)..(61): /note="Nucleotide may be methylated to form 5-methylcytosine"
tgaaaactgtgctgtgttgctccttttctatatctcagaagacaaacacagggaagcacacgtcaggggtttgccaactcacattaagcactctcagtgcacatctttagctagaaacttaa

SEQ ID NO: 2545 - DNA, 122 bp, Homo sapiens
  misc_feature (61)..(62): /note="This region represents a CpG dinucleotide"
  misc_feature (61)..(61): /note="Nucleotide may be methylated to form 5-methylcytosine"
cgcgcgcgtcgccgccgccgcctgagggggcgtggcctcggctcggcgcacagtcagccacggtcccatcctgctccgcgccggtcaacgagagcaaacccagtgactcacctccgccgtgc

SEQ ID NO: 2546 - DNA, 122 bp, Homo sapiens
  misc_feature (61)..(62): /note="This region represents a CpG dinucleotide"
  misc_feature (61)..(61): /note="Nucleotide may be methylated to form 5-methylcytosine"
agagggaaggacaagtgatggaggaaggatggattcggttaccagatgggagagtagctgcgccacagttgctaggagctgtagttggacaagaaaccacccatcgaggtcaggagtcactg

SEQ ID NO: 2547 - DNA, 122 bp, Homo sapiens
  misc_feature (61)..(62): /note="This region represents a CpG dinucleotide"
  misc_feature (61)..(61): /note="Nucleotide may be methylated to form 5-methylcytosine"
tcacactcagagcctctgagtcctggctcagctattcaagtaatggctttatgaatgacacgtccgatacacagctttagagaaagggaacacatcgcttctaacacttcctgacatttctt

SEQ ID NO: 2548 - DNA, 122 bp, Homo sapiens
  misc_feature (61)..(62): /note="This region represents a CpG dinucleotide"
  misc_feature (61)..(61): /note="Nucleotide may be methylated to form 5-methylcytosine"
aaacatcatctctaaaaaagaaacgaaaaaaattggcttggcatgttggcaggcacttgtcgtcctacatacttgagagggtgagagggtgagctcaggagtttgctgatacagtgaaatct

SEQ ID NO: 2549 - DNA, 122 bp, Homo sapiens
  misc_feature (61)..(62): /note="This region represents a CpG dinucleotide"
  misc_feature (61)..(61): /note="Nucleotide may be methylated to form 5-methylcytosine"
ttactgagccttttggaaaatcaaccaaaagtcttcgctgcttggagtctgattgagaagcgacagccagtgagggtgaagacgcagaaaccttcacagtagctcctcctcttagggtttta

SEQ ID NO: 2550 - DNA, 122 bp, Homo sapiens
  misc_feature (61)..(62): /note="This region represents a CpG dinucleotide"
  misc_feature (61)..(61): /note="Nucleotide may be methylated to form 5-methylcytosine"
aaaaccactaatcatacgtgattctgaaacttcatttctggccaactgtttatgtctcggcgtttctacttttcttaccaaccttgctgagaattagcataatcagaatatctgcctcaggt

SEQ ID NO: 2551 - DNA, 122 bp, Homo sapiens
  misc_feature (61)..(62): /note="This region represents a CpG dinucleotide"
  misc_feature (61)..(61): /note="Nucleotide may be methylated to form 5-methylcytosine"
atgagccaccgcgcccagccaaaccagtcttcttaagtcaggggaggcccacactcctgccgtgtggatctcatttcctagcacttgagctctagcacctgtggaaaagagagctcctggaa

SEQ ID NO: 2552 - DNA, 122 bp, Homo sapiens
  misc_feature (61)..(62): /note="This region represents a CpG dinucleotide"
  misc_feature (61)..(61): /note="Nucleotide may be methylated to form 5-methylcytosine"
caggctggtctcccatgaacccttgagctcaagtgatcctcctgccttggcctcccaaagcggtggaattttaggcgtgagccaccaggtccagctgtctacaacatttttacatgttggaa

SEQ ID NO: 2553 - DNA, 122 bp, Homo sapiens
  misc_feature (61)..(62): /note="This region represents a CpG dinucleotide"
  misc_feature (61)..(61): /note="Nucleotide may be methylated to form 5-methylcytosine"
ttaattaagctgagtgctctttgagaaaatctgttcaaatcccttgttacccgttttagccgtgctaagtggccaatatttctgacttttgaactttacgaaaagtaacctcacaggtgaaa

SEQ ID NO: 2554 - DNA, 122 bp, Homo sapiens
  misc_feature (61)..(62): /note="This region represents a CpG dinucleotide"
  misc_feature (61)..(61): /note="Nucleotide may be methylated to form 5-methylcytosine"
gcaaagggattaaatgtgcagcttggctcactcttgctcctggggatctgctgtgatgagcgtgtgctctctttataacaggagctactgtcccttgatactcggtccagtgcgcacacgtg

SEQ ID NO: 2555 - DNA, 122 bp, Homo sapiens
  misc_feature (61)..(62): /note="This region represents a CpG dinucleotide"
  misc_feature (61)..(61): /note="Nucleotide may be methylated to form 5-methylcytosine"
ttgcaaagacagaaatcttgcccttttgtatagccaagtatatacgacccattacatacacgttttcaagttgaacaataactagtcctcaagtaagaggacctgacatttgtgacattaac

SEQ ID NO: 2556 - DNA, 122 bp, Homo sapiens
  misc_feature (61)..(62): /note="This region represents a CpG dinucleotide"
  misc_feature (61)..(61): /note="Nucleotide may be methylated to form 5-methylcytosine"
taagtataataagggttacttgaacacaagaactgcaatgctgggacagctgatctgatacgagtcagctgctaagtgactaatatgtggatgctgaacaaaaggatgattcacatcctagg

SEQ ID NO: 2557 - DNA, 122 bp, Homo sapiens
  misc_feature (61)..(62): /note="This region represents a CpG dinucleotide"
  misc_feature (61)..(61): /note="Nucleotide may be methylated to form 5-methylcytosine"
tgtttcctttgctgtgcaggtttttagtttgatataatctcagttgtttattttgtctttcgctgcccgtgcttctgatgtcattgccaaaatcaatgtcatgaagcttctcccctttgttt

SEQ ID NO: 2558 - DNA, 122 bp, Homo sapiens
  misc_feature (61)..(62): /note="This region represents a CpG dinucleotide"
  misc_feature (61)..(61): /note="Nucleotide may be methylated to form 5-methylcytosine"
acccagccttgcagggaccagggctttagggctcacggacccaacggccaggtcagaccgcgaaccgggaggagcgcgggccccaccctaaagagggcgcagccgggagctggggagcgggt

SEQ ID NO: 2559 - DNA, 122 bp, Homo sapiens
  misc_feature (61)..(62): /note="This region represents a CpG dinucleotide"
  misc_feature (61)..(61): /note="Nucleotide may be methylated to form 5-methylcytosine"
aaattagtgtgtgattttggcttctccactaagttgtaaggtccttgagaacagagaccacgtcttgaataaatagatgaataaactgtatttgtcacatatttataacttctccatgaggt

SEQ ID NO: 2560 - DNA, 122 bp, Homo sapiens
  misc_feature (61)..(62): /note="This region represents a CpG dinucleotide"
  misc_feature (61)..(61): /note="Nucleotide may be methylated to form 5-methylcytosine"
tttgtattttttgttgagacgggctctccctatgtttccttggctgattttgaattccagcgctcaagcgatccgcccatcttggcctcccaaagagctgggattacaggcatgagccatga

SEQ ID NO: 2561 - DNA, 122 bp, Homo sapiens
  misc_feature (61)..(62): /note="This region represents a CpG dinucleotide"
  misc_feature (61)..(61): /note="Nucleotide may be methylated to form 5-methylcytosine"
ggctgcaacagcactagcctcccacaggcactgtaggtcagctcattcattcctccatggcgagtaaagagatgtgggaattatccaactcctcgaatcctgcccaggcagattcagtgtcc

SEQ ID NO: 2562 - DNA, 122 bp, Homo sapiens
  misc_feature (61)..(62): /note="This region represents a CpG dinucleotide"
  misc_feature (61)..(61): /note="Nucleotide may be methylated to form 5-methylcytosine"
ttgttatccgaaaaaaacaaacagcgttcattcacctgtcaagcaacaaacgactctccacgagaatgcagattttgatcaataggagttttattacttggctcaagtaaggggagcactgg

SEQ ID NO: 2563 - DNA, 122 bp, Homo sapiens
  misc_feature (61)..(62): /note="This region represents a CpG dinucleotide"
  misc_feature (61)..(61): /note="Nucleotide may be methylated to form 5-methylcytosine"
ctgcttagcaggaggcaggctgggcattgggttagcagtactggctctagagaattctaccgcataactgatatcttacacagaacagctctcttcctggcttgggcttcactaaggccatt

SEQ ID NO: 2564 - DNA, 122 bp, Homo sapiens
  misc_feature (61)..(62): /note="This region represents a CpG dinucleotide"
  misc_feature (61)..(61): /note="Nucleotide may be methylated to form 5-methylcytosine"
atgggactcaggatgaatgtccacaacagtttattgctggctaaatgaatggatattaggcgaacagaatgaaagcaaatcgttgtactgatcattggagtctcccagctgttgaagtttca

SEQ ID NO: 2565 - DNA, 122 bp, Homo sapiens
  misc_feature (61)..(62): /note="This region represents a CpG dinucleotide"
  misc_feature (61)..(61): /note="Nucleotide may be methylated to form 5-methylcytosine"
ccgcaccgcctgattccgaggggcgggagcgcattgggctgcgcacgggtgggggcgccgcgccagcttcgcgtagctgctctgacgccgctgccgccgccgccgccgccgccgccctccgc

SEQ ID NO: 2566 - DNA, 122 bp, Homo sapiens
  misc_feature (61)..(62): /note="This region represents a CpG dinucleotide"
  misc_feature (61)..(61): /note="Nucleotide may be methylated to form 5-methylcytosine"
atggcaggcacatcattctgtttcaaaagaagtgtcgctgggctctgcctcaatgccttccggcaggtggccaggaccagcagaccacttgctcgtcactaggctctgtttgttttctttgt

SEQ ID NO: 2567 - DNA, 122 bp, Homo sapiens
  misc_feature (61)..(62): /note="This region represents a CpG dinucleotide"
  misc_feature (61)..(61): /note="Nucleotide may be methylated to form 5-methylcytosine"
ggcgaggctgctgaggggagggcgtgtgagggtgaatgcggacggtgcaggcgcagctctcggtccagcgccaggacatgggacagcatttacccaagtcagcactgctcctcttggcacct

SEQ ID NO: 2568 - DNA, 122 bp, Homo sapiens
  misc_feature (61)..(62): /note="This region represents a CpG dinucleotide"
  misc_feature (61)..(61): /note="Nucleotide may be methylated to form 5-methylcytosine"
cagggtgagactgaagccctgtgctcaagtatctctgagcctggtaagttctgcccacatcgttcagactgctctcagctatttttcttttctcacctggattatccaggtatgccctaaat

SEQ ID NO: 2569 - DNA, 122 bp, Homo sapiens
  misc_feature (61)..(62): /note="This region represents a CpG dinucleotide"
  misc_feature (61)..(61): /note="Nucleotide may be methylated to form 5-methylcytosine"
tcccatccgaacctgcattaggactcaaatcctcggctgatcctggcagggctgggcctccgggcacagattagcacagaaaccccaggaactcaaagcacctgcaggcaaggatcactatg

SEQ ID NO: 2570 - DNA, 122 bp, Homo sapiens
  misc_feature (61)..(62): /note="This region represents a CpG dinucleotide"
  misc_feature (61)..(61): /note="Nucleotide may be methylated to form 5-methylcytosine"
atggacagtttgaggcctgtggctaaacagttggccaaatgacaaggctttaaatcaccccggaagttgtcctcttagcctaagtaggtcatctgccattttttctctgccaagccaggctt

SEQ ID NO: 2571 - DNA, 122 bp, Homo sapiens
  misc_feature (61)..(62): /note="This region represents a CpG dinucleotide"
  misc_feature (61)..(61): /note="Nucleotide may be methylated to form 5-methylcytosine"
ttgtacagaggttatcaccatcactaacaccatttctaaaataaaatgtaagtacctaatcgttaaacattaatacaatgttaaataccaatctataattgttaaatacaccttaaaggtag

SEQ ID NO: 2572 - DNA, 122 bp, Homo sapiens
  misc_feature (61)..(62): /note="This region represents a CpG dinucleotide"
  misc_feature (61)..(61): /note="Nucleotide may be methylated to form 5-methylcytosine"
gggcaacatagagcacccttcccctgctccaaaaacaacaacaacaaaaaattacccaggcgtggtggctcaggcctgtaataccagctacttgggaggctgaggtgggagaattacctgag

SEQ ID NO: 2573 - DNA, 122 bp, Homo sapiens
  misc_feature (61)..(62): /note="This region represents a CpG dinucleotide"
  misc_feature (61)..(61): /note="Nucleotide may be methylated to form 5-methylcytosine"
gatgtaaataggcagttgttgttacataggtctgaaactcagaggttgcctctgtgttggcgatgtcagttggaagccattaattcactgatggtatttaaaatagtgagaggggaggaaat

SEQ ID NO: 2574 - DNA, 122 bp, Homo sapiens
  misc_feature (61)..(62): /note="This region represents a CpG dinucleotide"
  misc_feature (61)..(61): /note="Nucleotide may be methylated to form 5-methylcytosine"
cagaggcagagcctgtttacccagatggtcttgatctctaaatcttacctttctgtcaaccgttcttatgttttgtgacagttttaagggctgctgttttacgagacagcagtcagatctag

SEQ ID NO: 2575 - DNA, 122 bp, Homo sapiens
  misc_feature (61)..(62): /note="This region represents a CpG dinucleotide"
  misc_feature (61)..(61): /note="Nucleotide may be methylated to form 5-methylcytosine"
gctggtactgggggttgtctgcagagtcctgtgatgtgaaccctctatgggtccctcagccgtggataccggtgcctgttctggtggaggtagcagagggtgcaatggactccatgagggtc

SEQ ID NO: 2576 - DNA, 122 bp, Homo sapiens
  misc_feature (61)..(62): /note="This region represents a CpG dinucleotide"
  misc_feature (61)..(61): /note="Nucleotide may be methylated to form 5-methylcytosine"
cagcataaaagcaaaggcaagggtgggggaggtgccacacgcttttaaacaatcagatctcgtgagaattcactcactatcggaggacagcaccaaggagatggtgctaaaccattggtgag

SEQ ID NO: 2577 - DNA, 122 bp, Homo sapiens
  misc_feature (61)..(62): /note="This region represents a CpG dinucleotide"
  misc_feature (61)..(61): /note="Nucleotide may be methylated to form 5-methylcytosine"
ctggccccagttcagctgatctccagtctgtctgcccatgagagtcccaggagagcatgccgtctaactaagccgcctgggctttgctctggacccctaaggagtccctacaggtcaggtct

SEQ ID NO: 2578 - DNA, 122 bp, Homo sapiens
  misc_feature (61)..(62): /note="This region represents a CpG dinucleotide"
  misc_feature (61)..(61): /note="Nucleotide may be methylated to form 5-methylcytosine"
atttctgggtttttaaattttgttctgtttgtctctgtgtctgtttttatgctagtaccacgctgttttggttactatctatagctctgtagtagaatttgaagacaggcaatgtcattcct

SEQ ID NO: 2579 - DNA, 122 bp, Homo sapiens
  misc_feature (61)..(62): /note="This region represents a CpG dinucleotide"
  misc_feature (61)..(61): /note="Nucleotide may be methylated to form 5-methylcytosine"
aaggcctctctaatagtgggtgccgtctaatagacaaaccaactaccttttgaaatggtacgtaactgactcagcattggacaagccaggtgatcacccctagaaggagggtgcattcagtg

SEQ ID NO: 2580 - DNA, 122 bp, Homo sapiens
  misc_feature (61)..(62): /note="This region represents a CpG dinucleotide"
  misc_feature (61)..(61): /note="Nucleotide may be methylated to form 5-methylcytosine"
gatataaagatgccaaatgacacctgcacacacagtgggttgtgttacagaaaaatcctgcgcttagggaacccaaatcttttgtaatagtcagtaagcatgccttaccattgctttcttcc

SEQ ID NO: 2581 - DNA, 122 bp, Homo sapiens
  misc_feature (61)..(62): /note="This region represents a CpG dinucleotide"
  misc_feature (61)..(61): /note="Nucleotide may be methylated to form 5-methylcytosine"
ccacactttacagataatgaatctgaagtttccatccacccatcccctcctccgctcaggcgctcaccaaatcttacactcatgaggtgctcagtagcctgtgctttggggcagcccacact

SEQ ID NO: 2582 - DNA, 122 bp, Homo sapiens
  misc_feature (61)..(62): /note="This region represents a CpG dinucleotide"
  misc_feature (61)..(61): /note="Nucleotide may be methylated to form 5-methylcytosine"
aaggaactttctcagccggataaagggcatctataaaaaagctacagctaacatcatactcgtattagtccatttatgcattgctttaaagaaatacatgaaactggataatttataaagaa

SEQ ID NO: 2583 - DNA, 122 bp, Homo sapiens
  misc_feature (61)..(62): /note="This region represents a CpG dinucleotide"
  misc_feature (61)..(61): /note="Nucleotide may be methylated to form 5-methylcytosine"
tgagttcagatgcattttaactagaagatagaggtacattatttcaaaaaacaattaattcgctttaaaaacctaaaacactggagatgatacaaacctgagctggcacagtgtatgggttt

SEQ ID NO: 2584 - DNA, 122 bp, Homo sapiens
  misc_feature (61)..(62): /note="This region represents a CpG dinucleotide"
  misc_feature (61)..(61): /note="Nucleotide may be methylated to form 5-methylcytosine"
tattctccatcccagtgtcaaacttccatggcacgataccattaccaaccatttcagcaacgatgcccacactgttggtttctagagattatttacttctgtatctgcccaacttataactc

SEQ ID NO: 2585 - DNA, 122 bp, Homo sapiens
  misc_feature (61)..(62): /note="This region represents a CpG dinucleotide"
  misc_feature (61)..(61): /note="Nucleotide may be methylated to form 5-methylcytosine"
ctgaaactcagactcttcttggaccttgagctggctggcttttagtctagaactacacatcggttctcctaaatctccaggttgctaattgcagatcttgggacttctgagcctccaataat

SEQ ID NO: 2586 - DNA, 122 bp, Homo sapiens
  misc_feature (61)..(62): /note="This region represents a CpG dinucleotide"
  misc_feature (61)..(61): /note="Nucleotide may be methylated to form 5-methylcytosine"
caactgaaaaatctttagtaaccagaaaacaaaaaaaagtgttccctgaattccccttcacggctcagcaactgacggtaagactgagcaagtcttgaagtctggcacaaaggaaggtagat

SEQ ID NO: 2587 - DNA, 122 bp, Homo sapiens
  misc_feature (61)..(62): /note="This region represents a CpG dinucleotide"
  misc_feature (61)..(61): /note="Nucleotide may be methylated to form 5-methylcytosine"
tatgtttttaataagtcaatttaattttgttaaagtcacaacgtcctttgaaattaaagacgccaaaggaaatcacaaaatcaagggcagaaaataggccgctgtgctgttggggacaaaga

SEQ ID NO: 2588 - DNA, 122 bp, Homo sapiens
  misc_feature (61)..(62): /note="This region represents a CpG dinucleotide"
  misc_feature (61)..(61): /note="Nucleotide may be methylated to form 5-methylcytosine"
tcttcaccctcctcccctggtgcttgcctgtgccccagcagggtgacagtgatgtagtagcgggtcctcctggaagagggacgcgtgtgtagggtctgggcaggctctggcaaggcagtccc

SEQ ID NO: 2589 - DNA, 122 bp, Homo sapiens
  misc_feature (61)..(62): /note="This region represents a CpG dinucleotide"
  misc_feature (61)..(61): /note="Nucleotide may be methylated to form 5-methylcytosine"
ctgggtgtgggtggcttatgcctgtaatgccagcactttgggaggctgaggtgggaagatcgcttgaggccagaaggagttcaagaccagctgggcaacacagcaagaccctgtctctacaa

SEQ ID NO: 2590 - DNA, 122 bp, Homo sapiens
  misc_feature (61)..(62): /note="This region represents a CpG dinucleotide"
  misc_feature (61)..(61): /note="Nucleotide may be methylated to form 5-methylcytosine"
gatacacccataggcacacatatgacatgcacacacacataggcacacacatgaagtgcgcgcgcgcgcacacacacacacacacacacacacacacaggaactacgggaggaccgaggaag

SEQ ID NO: 2591 - DNA, 122 bp, Homo sapiens
  misc_feature (61)..(62): /note="This region represents a CpG dinucleotide"
  misc_feature (61)..(61): /note="Nucleotide may be methylated to form 5-methylcytosine"
ttgccagagccacgagatgtctgtgagcaaatcagacggtcggctgaataggccacagtccgtcctcagccgaaggagaggcactgttggggataatgaattcatttggaaaacgtttacga

SEQ ID NO: 2592 - DNA, 122 bp, Homo sapiens
  misc_feature (61)..(62): /note="This region represents a CpG dinucleotide"
  misc_feature (61)..(61): /note="Nucleotide may be methylated to form 5-methylcytosine"
ctctttttgtaagcagaggtggctggctctgcagccttaaggccattttttaagtcaccacgtctagaagtcacatgaactctgctcagcaataatctgttctcagaacagacttttcaacc

SEQ ID NO: 2593 - DNA, 122 bp, Homo sapiens
  misc_feature (61)..(62): /note="This region represents a CpG dinucleotide"
  misc_feature (61)..(61): /note="Nucleotide may be methylated to form 5-methylcytosine"
tagagggggagttgtggaggagcccattctgaaactgatctgatattgcaaacccatacacggaaaggaagaactgcccatacgtattcgagtcttccaatctgactccgagcccgcatccc

SEQ ID NO: 2594 - DNA, 122 bp, Homo sapiens
  misc_feature (61)..(62): /note="This region represents a CpG dinucleotide"
  misc_feature (61)..(61): /note="Nucleotide may be methylated to form 5-methylcytosine"
gggtataagaattaaacatttcttcctactgattcttaataattctgtttattaagtgcacggactctagagattacctgggtttgaatcttggctctgccacttactagctgtgtgatctt

SEQ ID NO: 2595 - DNA, 122 bp, Homo sapiens
  misc_feature (61)..(62): /note="This region represents a CpG dinucleotide"
  misc_feature (61)..(61): /note="Nucleotide may be methylated to form 5-methylcytosine"
ccatcaggtgatggtcaggtggttgttaactgtctctctaaaataataattagtcacagccggcaccagggaaaggcatagatagaaaacacctgaaactggtgatcagcctcttcccatga

SEQ ID NO: 2596 - DNA, 122 bp, Homo sapiens
  misc_feature (61)..(62): /note="This region represents a CpG dinucleotide"
  misc_feature (61)..(61): /note="Nucleotide may be methylated to form 5-methylcytosine"
gacgtaatgttcactaaatataacatgagattactgtaaacaccactccgagagctgctgcgttgcaggcatctaaactgtcaggaaagcctgccagccagagacaaggtttccaaataaat

SEQ ID NO: 2597 - DNA, 122 bp, Homo sapiens
  misc_feature (61)..(62): /note="This region represents a CpG dinucleotide"
  misc_feature (61)..(61): /note="Nucleotide may be methylated to form 5-methylcytosine"
ggctcggcccctgctgaggttgtggccaggctctaaggaaatggatatcggagaggccttcgttgtggttccctagaagcagactctgaagcaaggatttgcgtgtaagtgaatgattgagg

SEQ ID NO: 2598 - DNA, 122 bp, Homo sapiens
  misc_feature (61)..(62): /note="This region represents a CpG dinucleotide"
  misc_feature (61)..(61): /note="Nucleotide may be methylated to form 5-methylcytosine"
cttcttcattgaatgaaatatcagtttgatctcagtatgtccctgcctaaaccctatagtcgcaagttctctatatgataaaggttgtactgcatgatatgtcctaaaaggcttggtgactg

SEQ ID NO: 2599 - DNA, 122 bp, Homo sapiens
  misc_feature (61)..(62): /note="This region represents a CpG dinucleotide"
  misc_feature (61)..(61): /note="Nucleotide may be methylated to form 5-methylcytosine"
gtagaatagccagcacacagtagacaagatttatgtagattacttgatgcagagtaggtgcgctttctgtgggtcaccaggtacgtagtacacatgctcaatgtggagcacctgacacacag

SEQ ID NO: 2600 - DNA, 122 bp, Homo sapiens
  misc_feature (61)..(62): /note="This region represents a CpG dinucleotide"
  misc_feature (61)..(61): /note="Nucleotide may be methylated to form 5-methylcytosine"
gcctgacgcaaaataagcactcaataaatacctgttgagtgagtgaatgaatctaaaaagcggatgactgagatagttttgatttgacgtggaaaaataaaaaagcatgactactatgcaca

SEQ ID NO: 2601 - DNA, 122 bp, Homo sapiens
  misc_feature (61)..(62): /note="This region represents a CpG dinucleotide"
  misc_feature (61)..(61): /note="Nucleotide may be methylated to form 5-methylcytosine"
agcctgagatatgtcggcaattctcagtgtctcagcttttcagttctgtgtgtgtgcacgcgtgtgtggtgtttgtatgtgtcaaattttctgctgtgaaaaccctggcacagatacccaga

SEQ ID NO: 2602 - DNA, 122 bp, Homo sapiens
  misc_feature (61)..(62): /note="This region represents a CpG dinucleotide"
  misc_feature (61)..(61): /note="Nucleotide may be methylated to form 5-methylcytosine"
tgcaatgaaaccacaatgctctccatcaatgccgaacacaaaagcaagacagcactagctcgccaaaagaggttctggggacgctggactccattcccagaaatacacaacttgctcgcatt

SEQ ID NO: 2603 - DNA, 122 bp, Homo sapiens
  misc_feature (61)..(62): /note="This region represents a CpG dinucleotide"
  misc_feature (61)..(61): /note="Nucleotide may be methylated to form 5-methylcytosine"
cactacggtacatatggaagggtcaaagtttctaatacgaccgtcagggtaaagtctaaacggtatttatgacaaggtgtgtgctaaaatcagctcacttgcagcaatggcttggattagat

SEQ ID NO: 2604 - DNA, 122 bp, Homo sapiens
  misc_feature (61)..(62): /note="This region represents a CpG dinucleotide"
  misc_feature (61)..(61): /note="Nucleotide may be methylated to form 5-methylcytosine"
tttttttgtggggatgtcctgtgcattgtaggatttttggtaacgtctctggcctctatccgctagatgccggtagcacctcctcccagttgtaacaaccaaatatacctccagacattgtc

SEQ ID NO: 2605 - DNA, 122 bp, Homo sapiens
  misc_feature (61)..(62): /note="This region represents a CpG dinucleotide"
  misc_feature (61)..(61): /note="Nucleotide may be methylated to form 5-methylcytosine"
ttgggtgtattatgaatggtgctgctgtgaacattcttgtacacatctggcgcacacatgcggggatttcccagaggttgaattgctgggtgtgggaatctccaaatttagataatatcaaa

SEQ ID NO: 2606 - DNA, 122 bp, Homo sapiens
  misc_feature (61)..(62): /note="This region represents a CpG dinucleotide"
  misc_feature (61)..(61): /note="Nucleotide may be methylated to form 5-methylcytosine"
agctagaccagcttatgtgccccaaatccctatcagaaaagaattctaacaatgaagtggcgtgtaagaagactaaaataaagaaaacttgcagaaggattatacctccaaagatgaaaaac

SEQ ID NO: 2607 - DNA, 122 bp, Homo sapiens
  misc_feature (61)..(62): /note="This region represents a CpG dinucleotide"
  misc_feature (61)..(61): /note="Nucleotide may be methylated to form 5-methylcytosine"
agaacaagaccagctggccttctgcagtccctgccaggtcccagccctgactttgtggttcgactttggtttgttcatccatgaaatggatgagcagaaccaactttggagagttgtagaga

SEQ ID NO: 2608 - DNA, 122 bp, Homo sapiens
  misc_feature (61)..(62): /note="This region represents a CpG dinucleotide"
  misc_feature (61)..(61): /note="Nucleotide may be methylated to form 5-methylcytosine"
ttcatggtaatgcagaatttgaaaatattttaaaaactcgagatagagatgcaagtagcacgggagatttttaacttttgggaaaaaaagaatcacttgaggggacaaccacaagttggaac

SEQ ID NO: 2609 - DNA, 122 bp, Homo sapiens
  misc_feature (61)..(62): /note="This region represents a CpG dinucleotide"
  misc_feature (61)..(61): /note="Nucleotide may be methylated to form 5-methylcytosine"
tactacatgatggggtgccaccatgcatctcttcccattctgcatttagtggcttcatgtcggcagcctgaaactggccaagatgggagtatttaaaccaggaaaattaatcctcaaatcag

SEQ ID NO: 2610 - DNA, 122 bp, Homo sapiens
  misc_feature (61)..(62): /note="This region represents a CpG dinucleotide"
  misc_feature (61)..(61): /note="Nucleotide may be methylated to form 5-methylcytosine"
cataagtaagatccagcgcagagaatacccgagggtgaaccgtgatgagaagtctcagagcgcactgcgtaattaccacgtgtagaaagcaaaacgttgacaagacacggccgttagcaaaa

SEQ ID NO: 2611 - DNA, 122 bp, Homo sapiens
  misc_feature (61)..(62): /note="This region represents a CpG dinucleotide"
  misc_feature (61)..(61): /note="Nucleotide may be methylated to form 5-methylcytosine"
ccactgagccagtgcgtacgttgaaataaacatcctcctgttctctcatattggtctctccgttcctcagtttcccacaacaggactacaggtgtgcaccaccaagctcagctaatttttat

SEQ ID NO: 2612 - DNA, 122 bp, Homo sapiens
  misc_feature (61)..(62): /note="This region represents a CpG dinucleotide"
  misc_feature (61)..(61): /note="Nucleotide may be methylated to form 5-methylcytosine"
taaacccatagcctaaaggtgattttatacagtattttaattaattttgcacacctgtcacgagatcaggtgtggattttccacttgtagtgtcatgttggcactcaaaaagttttggattt

SEQ ID NO: 2613 - DNA, 122 bp, Homo sapiens
  misc_feature (61)..(62): /note="This region represents a CpG dinucleotide"
  misc_feature (61)..(61): /note="Nucleotide may be methylated to form 5-methylcytosine"
cccttcactgtgtctgactctgatgtgctcattgttctgatgaggtgctgacagctgcaccgtgcatgtgttcactgtctgtcctctaccagcataaaaatgcaaaactgacgtctcttaaa

SEQ ID NO: 2614 - DNA, 122 bp, Homo sapiens
  misc_feature (61)..(62): /note="This region represents a CpG dinucleotide"
  misc_feature (61)..(61): /note="Nucleotide may be methylated to form 5-methylcytosine"
attttcctatcattattcccgtactaaggaggcacagttgccaccataaacagcacttaccggtggcatttacagcttctcaggtgatgtggcattctgaccagatgccagaaggcttgtga

SEQ ID NO: 2615 - DNA, 122 bp, Homo sapiens
  misc_feature (61)..(62): /note="This region represents a CpG dinucleotide"
  misc_feature (61)..(61): /note="Nucleotide may be methylated to form 5-methylcytosine"
cgcccacccgaccatagagacaccgcatggctagagaaacttccatgatgttctgggctgcgaacgaaaacagaaccaaagcgtcagaaaggagcgggtgaaggggcgcggccgttgccagg

SEQ ID NO: 2616 - DNA, 122 bp, Homo sapiens
  misc_feature (61)..(62): /note="This region represents a CpG dinucleotide"
  misc_feature (61)..(61): /note="Nucleotide may be methylated to form 5-methylcytosine"
gctctaaatatttaaagaacttattaaaacacaaattgctgagcctcacgggttcccaggcgatgctgatgtaactggtcctgaggccacactttgagaaccgctgctctaagtaacaaaat

SEQ ID NO: 2617 - DNA, 122 bp, Homo sapiens
  misc_feature (61)..(62): /note="This region represents a CpG dinucleotide"
  misc_feature (61)..(61): /note="Nucleotide may be methylated to form 5-methylcytosine"
caactacataaccatgtgaaacacatggctagggacctttccaagggctttgaaggggcacgtgcaagagaggggccctgaaacttaagcttcattagcgtcatgataaggtagcctctaac

SEQ ID NO: 2618 - DNA, 122 bp, Homo sapiens
  misc_feature (61)..(62): /note="This region represents a CpG dinucleotide"
  misc_feature (61)..(61): /note="Nucleotide may be methylated to form 5-methylcytosine"
accggaaggggcaggcagaggggtcacccagtgcgatgtcaagagtggggccggctggtccgggaatatgctggggagtggagcacgtttatattcgacgtaggaaaaacaatggagaggaa

SEQ ID NO: 2619 - DNA, 122 bp, Homo sapiens
  misc_feature (61)..(62): /note="This region represents a CpG dinucleotide"
  misc_feature (61)..(61): /note="Nucleotide may be methylated to form 5-methylcytosine"
aaaagtaaaacctcccaagagaggctcagagacagtgctaggagctcaccgaggaaaccccgtggggagagaggttcgtggtcgacgaggctttatggaaggaggtgaacctctgaactctg

SEQ ID NO: 2620 - DNA, 122 bp, Homo sapiens
  misc_feature (61)..(62): /note="This region represents a CpG dinucleotide"
  misc_feature (61)..(61): /note="Nucleotide may be methylated to form 5-methylcytosine"
taccaggcaaaagaagtaccaggctctaggggcagactgctggattatgactcaagttgacgcaggaagataacaaatccagtcctctccccagaggaattgagacctaggagtggccttct

SEQ ID NO: 2621 - DNA, 122 bp, Homo sapiens
  misc_feature (61)..(62): /note="This region represents a CpG dinucleotide"
  misc_feature (61)..(61): /note="Nucleotide may be methylated to form 5-methylcytosine"
ccattgccttggtctgaatcttccccaaaattcatgttgaaacttaatcaccattgcagtcgtattaagacgtgggtcctttaggaggtgattaggtcatgaagactcctccctcataaatg

SEQ ID NO: 2622 - DNA, 122 bp, Homo sapiens
  misc_feature (61)..(62): /note="This region represents a CpG dinucleotide"
  misc_feature (61)..(61): /note="Nucleotide may be methylated to form 5-methylcytosine"
aagggacttacctttgtccctgttcctacatccttctaggctctaactggtttgatgaagcgtgagtagctcagagatatacatgccaagaacggcctggaacagttttattgcccctcccc

SEQ ID NO: 2623 - DNA, 122 bp, Homo sapiens
  misc_feature (61)..(62): /note="This region represents a CpG dinucleotide"
  misc_feature (61)..(61): /note="Nucleotide may be methylated to form 5-methylcytosine"
ttctcagttaagctttatactggtggtgcagctaagagtagcatcacatcagcaatagctcgtaataaaaaataatcatgggatgaacttgatgtatactcagcatcagaagaaccaacaat

SEQ ID NO: 2624 - DNA, 122 bp, Homo sapiens
  misc_feature (61)..(62): /note="This region represents a CpG dinucleotide"
  misc_feature (61)..(61): /note="Nucleotide may be methylated to form 5-methylcytosine"
accaaacgtctgcccaagggagggagggcgcggaacccacccatgggcaatgactcagcacgaatccactcttctgcttgctgacccctgacctctgactcgaagtcagggccctcagctgg

SEQ ID NO: 2625 - DNA, 122 bp, Homo sapiens
  misc_feature (61)..(62): /note="This region represents a CpG dinucleotide"
  misc_feature (61)..(61): /note="Nucleotide may be methylated to form 5-methylcytosine"
tattacgcaagcccttcaggctctctggcaagtgataaaaactcaatgccaactaggttacgccaaaaacaaaagcacagattcaagcataaactcagggagtcaaagtatgctgtaagaat

SEQ ID NO: 2626 - DNA, 122 bp, Homo sapiens
  misc_feature (61)..(62): /note="This region represents a CpG dinucleotide"
  misc_feature (61)..(61): /note="Nucleotide may be methylated to form 5-methylcytosine"
gatacattgtgtgaaaatcaaatcaggatatttagcatatccatcatctcttacatttatcgtttgtattagttccttctcacactgctaataaagacatacttgaggctgggtaacttata

SEQ ID NO: 2627 - DNA, 122 bp, Homo sapiens
  misc_feature (61)..(62): /note="This region represents a CpG dinucleotide"
  misc_feature (61)..(61): /note="Nucleotide may be methylated to form 5-methylcytosine"
aatttctaaagcaggtgagaaacaaggcctgcccaagaaaagagaaagaatttaaaattacggcatatctatactacagaggaggcggtctgtccatgtcaatgtaaaggatcaccaagaga

SEQ ID NO: 2628 - DNA, 122 bp, Homo sapiens
  misc_feature (61)..(62): /note="This region represents a CpG dinucleotide"
  misc_feature (61)..(61): /note="Nucleotide may be methylated to form 5-methylcytosine"
tcttgctatctcctataccaataaatacgaagggctgtggaagatcagagcccttgttcacgagaagcaagaagccccctgaccccttgttccaaatatactcttttgtctttctctttatt

SEQ ID NO: 2629 - DNA, 122 bp, Homo sapiens
  misc_feature (61)..(62): /note="This region represents a CpG dinucleotide"
  misc_feature (61)..(61): /note="Nucleotide may be methylated to form 5-methylcytosine"
ctcgattgtaagttttaggtctcagtatttcagatggcctttggagttttataaccaaaacgcaggtttagtcgctcaccacttgcagattccaattaacaagagcaaggtctggtataaag

SEQ ID NO: 2630 - DNA, 122 bp, Homo sapiens
  misc_feature (61)..(62): /note="This region represents a CpG dinucleotide"
  misc_feature (61)..(61): /note="Nucleotide may be methylated to form 5-methylcytosine"
agggcatcagactaatttgtaagtgtattttgaattgatagaaggagggttatttaaaagcggatagaatgttgttacaacaggcatgttgggtgtggctaataacactcatgcagtgaact

SEQ ID NO: 2631 - DNA, 122 bp, Homo sapiens
  misc_feature (61)..(62): /note="This region represents a CpG dinucleotide"
  misc_feature (61)..(61): /note="Nucleotide may be methylated to form 5-methylcytosine"
agggaaataaatcatcccaattatacagggcgagctgccatgctgtctctatttctggagcggttgcttcccatgctggaagggagggaaaatgcaatgtagacaaaaaacccagggaaggg

SEQ ID NO: 2632 - DNA, 122 bp, Homo sapiens
  misc_feature (61)..(62): /note="This region represents a CpG dinucleotide"
  misc_feature (61)..(61): /note="Nucleotide may be methylated to form 5-methylcytosine"
ccaaacccagtaagcagtgccgctgggccttgtggctgctattgcacaatccagcacccacgccacaggtcacagagaatttgcatctcacaatgtgccgcagcaggctttgggcctcctct

SEQ ID NO: 2633 - DNA, 122 bp, Homo sapiens
  misc_feature (61)..(62): /note="This region represents a CpG dinucleotide"
  misc_feature (61)..(61): /note="Nucleotide may be methylated to form 5-methylcytosine"
tctttaaaagagataactttactatcctcataagatgccaactttttgagtcatcaacatcgttaaaaataaaggggatcaccttgagcttcaaaaatgcaaatcaactggaaaaacaccag

SEQ ID NO: 2634 - DNA, 122 bp, Homo sapiens
  misc_feature (61)..(62): /note="This region represents a CpG dinucleotide"
  misc_feature (61)..(61): /note="Nucleotide may be methylated to form 5-methylcytosine"
gcgccgttcaccttcggcgttatttccctgagggttgcaggtggttggtgagcgaggaggcgtctctgtgcacgcatgggtgctgttggaggcgtgcgggaggggtgtgttcgtgcgtgtgc

SEQ ID NO: 2635 - DNA, 122 bp, Homo sapiens
  misc_feature (61)..(62): /note="This region represents a CpG dinucleotide"
  misc_feature (61)..(61): /note="Nucleotide may be methylated to form 5-methylcytosine"
gccctcccgccagggtaaatactgtactcactgcagaagtgattcatagtgagagatggccggaaaaaggcttggccgtgacaacagtggctcacggggtggccaccgtgaccttgcagggg

SEQ ID NO: 2636 - DNA, 122 bp, Homo sapiens
  misc_feature (61)..(62): /note="This region represents a CpG dinucleotide"
  misc_feature (61)..(61): /note="Nucleotide may be methylated to form 5-methylcytosine"
gggaaggccagcagagtgttgcacacaggccatcattgtcatcagcatcgtcattgtcatcgtcatcctcacggcgatagtggtttgagggcagaggttgaggaccctttgagagggttttg

SEQ ID NO: 2637 - DNA, 122 bp, Homo sapiens
  misc_feature (61)..(62): /note="This region represents a CpG dinucleotide"
  misc_feature (61)..(61): /note="Nucleotide may be methylated to form 5-methylcytosine"
tctcctgttgccgccatcatgtcccggccctccacggtgttgggtgccatggagatggggcgccgtagtcacccgcgccttcctggagcacggccacaccaagatagacacggccttcgtgt

SEQ ID NO: 2638 - DNA, 122 bp, Homo sapiens
  misc_feature (61)..(62): /note="This region represents a CpG dinucleotide"
  misc_feature (61)..(61): /note="Nucleotide may be methylated to form 5-methylcytosine"
ctttagaatgtccgatgaccttcactttcttccaaccaatccatatttctgtttatttagcgtgtttttggaatgtgaaagagcaaaagacaataagttgtaaatgacttttactatcctgt

SEQ ID NO: 2639 - DNA, 122 bp, Homo sapiens
  misc_feature (61)..(62): /note="This region represents a CpG dinucleotide"
  misc_feature (61)..(61): /note="Nucleotide may be methylated to form 5-methylcytosine"
agttacttcatttcttcttttcctccctattggaaacacataacgtttcagaagaaagatcgcccaagagcgctggtttgggaagaggttctataaaagtgccatttggctggcccagtctt

SEQ ID NO: 2640 - DNA, 122 bp, Homo sapiens
  misc_feature (61)..(62): /note="This region represents a CpG dinucleotide"
  misc_feature (61)..(61): /note="Nucleotide may be methylated to form 5-methylcytosine"
gaaaacattagatccgagaagagaggctcagcatcattgatatcctgtagtgttttgtttcgggaaatgccatgctggtgattataaaggatgaagtcatatatttctaccaaccacatcct

SEQ ID NO: 2641 - DNA, 122 bp, Homo sapiens
  misc_feature (61)..(62): /note="This region represents a CpG dinucleotide"
  misc_feature (61)..(61): /note="Nucleotide may be methylated to form 5-methylcytosine"
aaaaaaaaaaaaaacctggtctattttgggatccacttgcttccttagagtttaatgatacggcatttaacaagagtgactccattttggtttggtctaatctgttgggccctagtacaaga

SEQ ID NO: 2642 - DNA, 122 bp, Homo sapiens
  misc_feature (61)..(62): /note="This region represents a CpG dinucleotide"
  misc_feature (61)..(61): /note="Nucleotide may be methylated to form 5-methylcytosine"
catggctcactgcagcctcaaccctctaggctcaagcagtcttcctgcctcagccttcctcgtagctgggactgcatatgtgtgcctggctaatttattttttataacgatagagtcttgct

SEQ ID NO: 2643 - DNA, 122 bp, Homo sapiens
  misc_feature (61)..(62): /note="This region represents a CpG dinucleotide"
  misc_feature (61)..(61): /note="Nucleotide may be methylated to form 5-methylcytosine"
ccggatgattcactggggcaagtcttggcacacccttactcattttgatagagcagtcatcgctcggtattttgagggcactggttccaggacccccgtgcatagcaaagtctgaggatgtt

SEQ ID NO: 2644 - DNA, 122 bp, Homo sapiens
  misc_feature (61)..(62): /note="This region represents a CpG dinucleotide"
  misc_feature (61)..(61): /note="Nucleotide may be methylated to form 5-methylcytosine"
cgcagttctgtggatcaggaattcagggcatgacgggattggcttggctctgctccacgacgtgtggggcctcagctggaagaccggaagactggagggctgacgttacctgcaggcttcat

SEQ ID NO: 2645 - DNA, 122 bp, Homo sapiens
  misc_feature (61)..(62): /note="This region represents a CpG dinucleotide"
  misc_feature (61)..(61): /note="Nucleotide may be methylated to form 5-methylcytosine"
tgccggctcttggcacagcactgccaagctgccgtttctcgggtgctgagccacggcgggcgcggggctgggccctgcacgtgcattgtcctgtttctgttcaaagtttgaaaaacccaaac

SEQ ID NO: 2646 - DNA, 122 bp, Homo sapiens
  misc_feature (61)..(62): /note="This region represents a CpG dinucleotide"
  misc_feature (61)..(61): /note="Nucleotide may be methylated to form 5-methylcytosine"
gagttgtaataatatttgctgatgtggatcacttcatagaggggagaccttacttaggtgcgccagtttaaatacaagtgagaagaggcatgttcaagaaattgtattgagtcccggagctg

SEQ ID NO: 2647 - DNA, 122 bp, Homo sapiens
  misc_feature (61)..(62): /note="This region represents a CpG dinucleotide"
  misc_feature (61)..(61): /note="Nucleotide may be methylated to form 5-methylcytosine"
tgtagccttctgtgactagcttctttcacttagcatcaggtttctcaggttccttcatgtcgtgatatgacttaactttatcttatgaccgaatagtattccattgtatggatataccacat

SEQ ID NO: 2648 - DNA, 122 bp, Homo sapiens
  misc_feature (61)..(62): /note="This region represents a CpG dinucleotide"
  misc_feature (61)..(61): /note="Nucleotide may be methylated to form 5-methylcytosine"
agctaaattttattgagcactgaccttctttgtcccaagactgttctaagggcattataacgttatcaatttcttggagtctcataaataccctaaagcacaggcactattttaacactcat

SEQ ID NO: 2649 - DNA, 122 bp, Homo sapiens
  misc_feature (61)..(62): /note="This region represents a CpG dinucleotide"
  misc_feature (61)..(61): /note="Nucleotide may be methylated to form 5-methylcytosine"
ccatactggtcaggctggtctcgaactcctgacctcaggtgatccacacacctcggcctccgaaagtgctaggattacagtcgtgaaccaccgcgcttggccgcaacttgatttttaaattg

SEQ ID NO: 2650 - DNA, 122 bp, Homo sapiens
  misc_feature (61)..(62): /note="This region represents a CpG dinucleotide"
  misc_feature (61)..(61): /note="Nucleotide may be methylated to form 5-methylcytosine"
aacacagatttactgttttgctacatatccagataggaatttacttaaggcttagtttgtcgcttatttggatcgtggtgatgtagggtgattactctagcaaaaagcaagaaggctggtac

SEQ ID NO: 2651 - DNA, 122 bp, Homo sapiens
  misc_feature (61)..(62): /note="This region represents a CpG dinucleotide"
  misc_feature (61)..(61): /note="Nucleotide may be methylated to form 5-methylcytosine"
aagcttgttctaaagagaacatggagggtgtggctgaatacccatttaagaaaaagatcacgggtgcaattcatggacttaatcagacatctcagcagaagccaggaatagagatgggatta

SEQ ID NO: 2652 - DNA, 122 bp, Homo sapiens
  misc_feature (61)..(62): /note="This region represents a CpG dinucleotide"
  misc_feature (61)..(61): /note="Nucleotide may be methylated to form 5-methylcytosine"
agctagcatcctcctttcactttccaccccttatccctgagctggccataggtaccactgcggtatgtaccaatgaagtaggggaaacctggagaataggaattaaccaccctcacctatgc

SEQ ID NO: 2653 - DNA, 122 bp, Homo sapiens
  misc_feature (61)..(62): /note="This region represents a CpG dinucleotide"
  misc_feature (61)..(61): /note="Nucleotide may be methylated to form 5-methylcytosine"
atggatggtctatgcctgtgccacatccagccagcaggcatttacatttggcttgcataacgtttaaaatgatttgaatcagttgccaaaaactaaaagccaggagattttcatgtaaaaag

SEQ ID NO: 2654 - DNA, 122 bp, Homo sapiens
  misc_feature (61)..(62): /note="This region represents a CpG dinucleotide"
  misc_feature (61)..(61): /note="Nucleotide may be methylated to form 5-methylcytosine"
gaggacctgtgtaaagtacttcctacagggtgatgctgctgaacaaccactctgctttggcgtctcctttggctgagctacagagcagagtttccctggctgaggatggtagtcccatctcc

SEQ ID NO: 2655 - DNA, 122 bp, Homo sapiens
  misc_feature (61)..(62): /note="This region represents a CpG dinucleotide"
  misc_feature (61)..(61): /note="Nucleotide may be methylated to form 5-methylcytosine"
attagtctttacacaatccactgacatggacagctataaaagttacacttgctgctctagcgctgactagacaaatttgtagtgattagcacattacctgaactatcattccaagtttgtct

SEQ ID NO: 2656 - DNA, 122 bp, Homo sapiens
  misc_feature (61)..(62): /note="This region represents a CpG dinucleotide"
  misc_feature (61)..(61): /note="Nucleotide may be methylated to form 5-methylcytosine"
tggccatgattgggaacttcacgtatggacttggtgtggttttaaaggcaccagctgctacgtgtcacaagaatacttactttgtgcatcatcttccttggcttattgcaagttttggaatc

SEQ ID NO: 2657 - DNA, 122 bp, Homo sapiens
  misc_feature (61)..(62): /note="This region represents a CpG dinucleotide"
  misc_feature (61)..(61): /note="Nucleotide may be methylated to form 5-methylcytosine"
gagagaaacagggaagatggagaaagactggctcctctgacagctggaagcagctggtaacgctgaagaataaaggcagatcatcacaagacaggaaggagtcagaaacctggaaatcaatg

SEQ ID NO: 2658 - DNA, 122 bp, Homo sapiens
  misc_feature (61)..(62): /note="This region represents a CpG dinucleotide"
  misc_feature (61)..(61): /note="Nucleotide may be methylated to form 5-methylcytosine"
ttaaatttttagatggtcattgaggtgatccaacctctaaaatccctgatcacggtctaacgcagaagccctggcccccactctgggaacccaggcccaggagcgcctttggggtggtttgt

SEQ ID NO: 2659 - DNA, 122 bp, Homo sapiens
  misc_feature (61)..(62): /note="This region represents a CpG dinucleotide"
  misc_feature (61)..(61): /note="Nucleotide may be methylated to form 5-methylcytosine"
aaatgaccataattcccaaagcagtctacagatttaattcaattcctatgaaaataccaacgtcatttttcacagaaatagaaaaaacaatcctaaagttcataggaaacattaaaagaccc

SEQ ID NO: 2660 - DNA, 122 bp, Homo sapiens
  misc_feature (61)..(62): /note="This region represents a CpG dinucleotide"
  misc_feature (61)..(61): /note="Nucleotide may be methylated to form 5-methylcytosine"
aaaatgaagagtaggaggataagagaaagaaacaactctcatatttctaacttgtgtgatcgcatggatgacagcatagttcacaatgcatggaaaacatgaggaaaagcggatttggcaac

SEQ ID NO: 2661 - DNA, 122 bp, Homo sapiens
  misc_feature (61)..(62): /note="This region represents a CpG dinucleotide"
  misc_feature (61)..(61): /note="Nucleotide may be methylated to form 5-methylcytosine"
ggtaaaatcctttgtgcaacactcttactccctgaatgttttgctgtgctggaacttgtgcgtgccagacaaggccaagctgggtgaaagagcaatcagccacctctgcaacctgccacctc

SEQ ID NO: 2662 - DNA, 122 bp, Homo sapiens
  misc_feature (61)..(62): /note="This region represents a CpG dinucleotide"
  misc_feature (61)..(61): /note="Nucleotide may be methylated to form 5-methylcytosine"
caacacaaggagaccttgtctctatattgcctaggctggtcttgaactcttggccttaaacgatccttttgtttaaaaaataagaacattagctgggcattgtggtgtgtgcttatagtcct

SEQ ID NO: 2663 - DNA, 122 bp, Homo sapiens
  misc_feature (61)..(62): /note="This region represents a CpG dinucleotide"
  misc_feature (61)..(61): /note="Nucleotide may be methylated to form 5-methylcytosine"
ggaagcatgtgatgagttgtgtgatgaagatagagcccattgtgctgtctctccaggacacgttgtctataatgatacagatgggtatgccttgggctatgactttcactatgtttttgttc

SEQ ID NO: 2664 - DNA, 122 bp, Homo sapiens
  misc_feature (61)..(62): /note="This region represents a CpG dinucleotide"
  misc_feature (61)..(61): /note="Nucleotide may be methylated to form 5-methylcytosine"
gtgtcattcagagacagttggctgtatccaagggttgccttccctacttcagttgcattgcgtagagcaggctcaacccctccaggggagggtgcccttgcgtacccacagtcaggtgtaga

SEQ ID NO: 2665 - DNA, 122 bp, Homo sapiens
  misc_feature (61)..(62): /note="This region represents a CpG dinucleotide"
  misc_feature (61)..(61): /note="Nucleotide may be methylated to form 5-methylcytosine"
ctgcctccatgggtgctggctgaattctgccttgtgttgctctccactgtgacagggcagcgctgagtttcaaggtaaagtcccacaatcactgagctctccctgccctgggtgcacagatt

SEQ ID NO: 2666 - DNA, 122 bp, Homo sapiens
  misc_feature (61)..(62): /note="This region represents a CpG dinucleotide"
  misc_feature (61)..(61): /note="Nucleotide may be methylated to form 5-methylcytosine"
tggaggctggggcgctttggggccatgggggccagccctggtacctgcgtcgggctgggacgctctgcacttacagccaggagtcatccatgggcccccgtgggcatgctgaccatggttgt

SEQ ID NO: 2667 - DNA, 122 bp, Homo sapiens
  misc_feature (61)..(62): /note="This region represents a CpG dinucleotide"
  misc_feature (61)..(61): /note="Nucleotide may be methylated to form 5-methylcytosine"
ccgaaaacatattgttcctagaccattcagtagaggaaagaatagtcatttcaataatggcggcactgggacaactggatctccacatgcaaaagaaccaatttggacgtgtatctctcatc

SEQ ID NO: 2668 - DNA, 122 bp, Homo sapiens
  misc_feature (61)..(62): /note="This region represents a CpG dinucleotide"
  misc_feature (61)..(61): /note="Nucleotide may be methylated to form 5-methylcytosine"
agagcaggaaagagcccgacccacctcctcggttcttccagggaaccccttctcggagggcgccctgggcctccgcgccatattcctggtcccccgctcccggtgactccggctccctgggt

SEQ ID NO: 2669 - DNA, 122 bp, Homo sapiens
  misc_feature (61)..(62): /note="This region represents a CpG dinucleotide"
  misc_feature (61)..(61): /note="Nucleotide may be methylated to form 5-methylcytosine"
acccgacctccgtaggggacaccgagccaaggcctgcagcgagtgacctgcccggggaggcgcgggaccgaggctcacctacccgggcccgcgagtctcgcccagccccagcctcccaaccc

SEQ ID NO: 2670 - DNA, 122 bp, Homo sapiens
  misc_feature (61)..(62): /note="This region represents a CpG dinucleotide"
  misc_feature (61)..(61): /note="Nucleotide may be methylated to form 5-methylcytosine"
tgttggaatgtgcctaccaaacacagcaaggggcgacactcacccgaaggttgaaacatgcggaactccgatgactcctagtgctgttagcaatcataaatcctcatcctggcacagagcac

SEQ ID NO: 2671 - DNA, 122 bp, Homo sapiens
  misc_feature (61)..(62): /note="This region represents a CpG dinucleotide"
  misc_feature (61)..(61): /note="Nucleotide may be methylated to form 5-methylcytosine"
aatcaaaggggcacctcatgcatgatcgggaattttccctgcatccaactcttaggagtacgtgcaccagaaagtgggctgaccaaggtcgagtgcttattagtttaataattggaacaccc

SEQ ID NO: 2672 - DNA, 122 bp, Homo sapiens
  misc_feature (61)..(62): /note="This region represents a CpG dinucleotide"
  misc_feature (61)..(61): /note="Nucleotide may be methylated to form 5-methylcytosine"
tgcactttaaccttgttctttacctgctctgaagcctttcttgcattttaatgacaagaacggtgtattttgcctttcagtgagtttgttaattatggagatcaaactctgcctttcattac

SEQ ID NO: 2673 - DNA, 122 bp, Homo sapiens
  misc_feature (61)..(62): /note="This region represents a CpG dinucleotide"
  misc_feature (61)..(61): /note="Nucleotide may be methylated to form 5-methylcytosine"
ggccgactgccttgggtgtcagccacatctgttgagatgcgtgtgcctgacgcccgaacgcgtgccagcgttttctgcgagctgtcatgtgaggggcctggggcgtggcctgctgcgagtgt

SEQ ID NO: 2674 - DNA, 122 bp, Homo sapiens
  misc_feature (61)..(62): /note="This region represents a CpG dinucleotide"
  misc_feature (61)..(61): /note="Nucleotide may be methylated to form 5-methylcytosine"
tagacacgtttctttgtaaataaccctggagtgactgatagagcttttgccagacaaaggcgcaaatagcaaggcattactcatgccaagccggagaacactgtgtcacggctgacaaattt

SEQ ID NO: 2675 - DNA, 122 bp, Homo sapiens
  misc_feature (61)..(62): /note="This region represents a CpG dinucleotide"
  misc_feature (61)..(61): /note="Nucleotide may be methylated to form 5-methylcytosine"
ctgactctacatggcatgtgtattttgatttgaactggtatttccccccttcttcactgacgttcagtaagggtagcaaagagacaagtgctgttctgtactcaatcaggtaaaaggggttt

SEQ ID NO: 2676 - DNA, 122 bp, Homo sapiens
  misc_feature (61)..(62): /note="This region represents a CpG dinucleotide"
  misc_feature (61)..(61): /note="Nucleotide may be methylated to form 5-methylcytosine"
ctgctggtgaggtcggcgatccgggtgtagctggggttgcaggcttggcaggcacggcggcggtatcgggaggcacagcgatcttgagggactcaaaaggctgggacaactgagaccccgtg

SEQ ID NO: 2677 - DNA, 122 bp, Homo sapiens
  misc_feature (61)..(62): /note="This region represents a CpG dinucleotide"
  misc_feature (61)..(61): /note="Nucleotide may be methylated to form 5-methylcytosine"
gtctttgacatctgcttaccagcataaattagcagagaagctcactatcctgaatgatcgcggtcagggggttctcatccgtatgtataacatcaagaaggtaagcatgaacaatgggacta

SEQ ID NO: 2678 - DNA, 122 bp, Homo sapiens
  misc_feature (61)..(62): /note="This region represents a CpG dinucleotide"
  misc_feature (61)..(61): /note="Nucleotide may be methylated to form 5-methylcytosine"
tgtgtatgaaaccgtgtcaggctcaggagacctgtttctgtttctactggtgccaggctccgactgtagggagcattggcagttcacgcagatagtcatggcattcaaggcaaaagcagact

SEQ ID NO: 2679 - DNA, 122 bp, Homo sapiens
  misc_feature (61)..(62): /note="This region represents a CpG dinucleotide"
  misc_feature (61)..(61): /note="Nucleotide may be methylated to form 5-methylcytosine"
gctacagctactgtgttttccggtgaaatgaggaccaggcaaatgtaaaggaataaggttcgtcggcagccaacatcagcaactacgacatcaaggcagccagcctgcacaacctgaagaaa

SEQ ID NO: 2680 - DNA, 122 bp, Homo sapiens
  misc_feature (61)..(62): /note="This region represents a CpG dinucleotide"
  misc_feature (61)..(61): /note="Nucleotide may be methylated to form 5-methylcytosine"
gctgcccctcccttactgtgtagagaacttggtgcagcggggccctctttgcccccacaccgaggcatatcttcaggaatttggagcactggctcatctggattagcagcctgagctgccca

SEQ ID NO: 2681 - DNA, 122 bp, Homo sapiens
  misc_feature (61)..(62): /note="This region represents a CpG dinucleotide"
  misc_feature (61)..(61): /note="Nucleotide may be methylated to form 5-methylcytosine"
ctgagacccgctcatcccctcctctgcaaactcaggcaccttcctaccctcctgacctgccggagtgcctgcctcttcaccaggtgcaactaactgggccacaacagttgctgcatgttccc

SEQ ID NO: 2682 - DNA, 122 bp, Homo sapiens
  misc_feature (61)..(62): /note="This region represents a CpG dinucleotide"
  misc_feature (61)..(61): /note="Nucleotide may be methylated to form 5-methylcytosine"
accaaggagtgagttatttattatttatttatttatttattattttgccctcctgctcctcgggaggcttctgtcctgagctcgccttagctaatcctgcgttaccgttcggcaggtgtgcg

SEQ ID NO: 2683 - DNA, 122 bp, Homo sapiens
  misc_feature (61)..(62): /note="This region represents a CpG dinucleotide"
  misc_feature (61)..(61): /note="Nucleotide may be methylated to form 5-methylcytosine"
cctcacccaaatcatatatacactagagttttcactttcattcggggttcgcatcacaagcgactgtgcgatgaaatattctaaaaatctagcatctcttttaaagttcactttgaaattta

SEQ ID NO: 2684 - DNA, 122 bp, Homo sapiens
  misc_feature (61)..(62): /note="This region represents a CpG dinucleotide"
  misc_feature (61)..(61): /note="Nucleotide may be methylated to form 5-methylcytosine"
gagccacccaggtagcgatacggtatttggttatggcaaccctaagaagttataactgaacgacaaaaaaaatgctgaggatatgtttgctgttcattgcctgtgggaatctaaagtggtaa

SEQ ID NO: 2685 - DNA, 122 bp, Homo sapiens
  misc_feature (61)..(62): /note="This region represents a CpG dinucleotide"
  misc_feature (61)..(61): /note="Nucleotide may be methylated to form 5-methylcytosine"
ctccccatttcccctctccaccgcccctggtgcccgccatcctttcagtctctatgaatccgactcctctagggacctcacataagtcgagtcttgccgtatctgtcctttcgtgtctggct

SEQ ID NO: 2686 - DNA, 122 bp, Homo sapiens
  misc_feature (61)..(62): /note="This region represents a CpG dinucleotide"
  misc_feature (61)..(61): /note="Nucleotide may be methylated to form 5-methylcytosine"
cataaaaggtactccctaaatctagaacaattttaaaggcttggaatacttatgggcagacgaacatgggaatgatctgaaaggctcattatggcatcctgacttgcccagttgaattaaat

SEQ ID NO: 2687 - DNA, 122 bp, Homo sapiens
  misc_feature (61)..(62): /note="This region represents a CpG dinucleotide"
  misc_feature (61)..(61): /note="Nucleotide may be methylated to form 5-methylcytosine"
ctcagtaacatggaggaactgatgaagatgaaaattaacccaagaaaaccaccacattagcggggacctccatcaacacacaaaacccctgagaataagaatgagataaagaaccaacaatt

SEQ ID NO: 2688 - DNA, 122 bp, Homo sapiens
  misc_feature (61)..(62): /note="This region represents a CpG dinucleotide"
  misc_feature (61)..(61): /note="Nucleotide may be methylated to form 5-methylcytosine"
gtctttgaagatgtttctggatgagatcagcatttgaatcagtccagtgagtgaagcagacggcctgccctaatgcgggtgggcctcatccaatcagttgacagccagaatagaacaaaaag

SEQ ID NO: 2689 - DNA, 122 bp, Homo sapiens
  misc_feature (61)..(62): /note="This region represents a CpG dinucleotide"
  misc_feature (61)..(61): /note="Nucleotide may be methylated to form 5-methylcytosine"
gagttcagagccaggtgatcggcagtgctcgctcttaatgactgtgtttcatctgcagggcgaacgctgttggagaagctgttcagccagcaggagaacgggcctccagaagaagcagagaa

SEQ ID NO: 2690 - DNA, 122 bp, Homo sapiens
  misc_feature (61)..(62): /note="This region represents a CpG dinucleotide"
  misc_feature (61)..(61): /note="Nucleotide may be methylated to form 5-methylcytosine"
aaaatgcagcccagtttctacctagaaggggtttatgacacatttccggaggctacttggcggcctggcttctaaccaatatgcaacagggatttagaggggcagacacacattaacccagc

SEQ ID NO: 2691 - DNA, 122 bp, Homo sapiens
  misc_feature (61)..(62): /note="This region represents a CpG dinucleotide"
  misc_feature (61)..(61): /note="Nucleotide may be methylated to form 5-methylcytosine"
gagcttcagaacgactcctccctcctcttctctcactcctgcctctcccatacctactttcggagtgccttatactaagaaagaaggggtatgaagggttagcttgaatcatgccggttccc

SEQ ID NO: 2692 - DNA, 122 bp, Homo sapiens
  misc_feature (61)..(62): /note="This region represents a CpG dinucleotide"
  misc_feature (61)..(61): /note="Nucleotide may be methylated to form 5-methylcytosine"
catagggaggccctgtctcaaaagaaaaaaaaaaagatagaaaaatggaccagtgcccagcggcagtgagctgtgatagctctactgcactccaccctgggtgacagagggcaaatctgtct

SEQ ID NO: 2693 - DNA, 122 bp, Homo sapiens
  misc_feature (61)..(62): /note="This region represents a CpG dinucleotide"
  misc_feature (61)..(61): /note="Nucleotide may be methylated to form 5-methylcytosine"
aaaatggaaaaatgcaggtactttcctctcctcagagatagcttctattaaaaatcttcacgtcagctgggcacggtgactcatgcctgtaatcccagcactttgggaggccaaggcaggcg

SEQ ID NO: 2694 - DNA, 122 bp, Homo sapiens
  misc_feature (61)..(62): /note="This region represents a CpG dinucleotide"
  misc_feature (61)..(61): /note="Nucleotide may be methylated to form 5-methylcytosine"
gagcatgctgtgcaggaacaacagtgaagcatttggccttggtatttttattttagtatgcgtacttgcgaaggacaaaagaaaggtcggaaagcaaacaatgcaggaagcagttgaaaaaa

SEQ ID NO: 2695 - DNA, 122 bp, Homo sapiens
  misc_feature (61)..(62): /note="This region represents a CpG dinucleotide"
  misc_feature (61)..(61): /note="Nucleotide may be methylated to form 5-methylcytosine"
ctaacgctactttggaactcctaacagtgttcccttgttgtaaaactaggagcagtaaaccgatatttttctctggtgttttctcctttattataattaatttcagaattactgctaaacaa

SEQ ID NO: 2696 - DNA, 122 bp, Homo sapiens
  misc_feature (61)..(62): /note="This region represents a CpG dinucleotide"
  misc_feature (61)..(61): /note="Nucleotide may be methylated to form 5-methylcytosine"
caagtaatggattctaacaagaatgaaatgtctgaaatgacaaatatagaattcagaatacgggtggcaaagaaactcaatgagatccaagagaagttgaaatccacacaaaaccagaaaaa

SEQ ID NO: 2697 - DNA, 122 bp, Homo sapiens
  misc_feature (61)..(62): /note="This region represents a CpG dinucleotide"
  misc_feature (61)..(61): /note="Nucleotide may be methylated to form 5-methylcytosine"
ccagtgcttaccccaatcatttaacctctctgaaccttagttttctcatctgcaaaatggcgctgaaaccatctgtgcacttggggttgtgggaggaataaatacatgtaaaacacctgatg

SEQ ID NO: 2698 - DNA, 122 bp, Homo sapiens
  misc_feature (61)..(62): /note="This region represents a CpG dinucleotide"
  misc_feature (61)..(61): /note="Nucleotide may be methylated to form 5-methylcytosine"
gacttgaaaaacgccctattatttagactgacctaattcaaagttctttgcagcttacctcgtgctaatcactggcaagtggtctccagctgctctttggttttggttgtttcacgtccttg

SEQ ID NO: 2699 - DNA, 122 bp, Homo sapiens
  misc_feature (61)..(62): /note="This region represents a CpG dinucleotide"
  misc_feature (61)..(61): /note="Nucleotide may be methylated to form 5-methylcytosine"
ttgcaaagtgggttccattgctgctttaagacttccccccaatctctcaggaaagcactacgccaatatatgggattatgatttttattatcgtttcgttttatagctcagattaatcatgt

SEQ ID NO: 2700 - DNA, 122 bp, Homo sapiens
  misc_feature (61)..(62): /note="This region represents a CpG dinucleotide"
  misc_feature (61)..(61): /note="Nucleotide may be methylated to form 5-methylcytosine"
aacctgccttagtttatccatgaacaaagccacgcatgctagtggacacacacacacatgcgcgtgcgcgcgcacacacacacacacacacatacacacagagactttgtatgtgagtaatg

SEQ ID NO: 2701 - DNA, 122 bp, Homo sapiens
  misc_feature (61)..(62): /note="This region represents a CpG dinucleotide"
  misc_feature (61)..(61): /note="Nucleotide may be methylated to form 5-methylcytosine"
aggctgagactagggcatcaaatcctaatagcctctgtttactgagcacacagtctgtgccgtgtcctgtgctgaggacttgataggcattatctcttttaatcctcccaattcctggtggg

SEQ ID NO: 2702 - DNA, 122 bp, Homo sapiens
  misc_feature (61)..(62): /note="This region represents a CpG dinucleotide"
  misc_feature (61)..(61): /note="Nucleotide may be methylated to form 5-methylcytosine"
tattttgtgactctcagctctttgagaaggcagtgtgtctcagaaagccagcggtaaaagcgatggttgctaagggaacaattgaattgctgacactgagacatgtaatgtgactgaaaact

SEQ ID NO: 2703 - DNA, 122 bp, Homo sapiens
  misc_feature (61)..(62): /note="This region represents a CpG dinucleotide"
  misc_feature (61)..(61): /note="Nucleotide may be methylated to form 5-methylcytosine"
cctgccaggtccccacacacaggcccattcgcacacaaaaatcatctttttgcacgccggcgggagcagcggaagtcattaacatccgcggttgtgctgcaattaaagttaggcctggggat

SEQ ID NO: 2704 - DNA, 122 bp, Homo sapiens
  misc_feature (61)..(62): /note="This region represents a CpG dinucleotide"
  misc_feature (61)..(61): /note="Nucleotide may be methylated to form 5-methylcytosine"
gctgctcttctggtttaggttctggcctttcccactggggttttccagcagcctctgtagcggtcttcgttgttgagcacttcactgttcatccccaggttctccatccagctgctgttgga

SEQ ID NO: 2705 - DNA, 122 bp, Homo sapiens
  misc_feature (61)..(62): /note="This region represents a CpG dinucleotide"
  misc_feature (61)..(61): /note="Nucleotide may be methylated to form 5-methylcytosine"
ccagaaggacctgccaactttcagggtgggagagtgggccatgttcccaaagaatgcctgcgtggtttactgagcctcactgactttggaaagcaaagcatgtgagtgcttaagcccacttg

SEQ ID NO: 2706 - DNA, 122 bp, Homo sapiens
  misc_feature (61)..(62): /note="This region represents a CpG dinucleotide"
  misc_feature (61)..(61): /note="Nucleotide may be methylated to form 5-methylcytosine"
agaatgtgtgagaaataaaagttcccacttaaaaccacccggaggccagacacagtggttcgcgcctgtaatcccagcactttaggaagttgaggttcgaggtgggtggatcacttgagtcc

SEQ ID NO: 2707 - DNA, 122 bp, Homo sapiens
  misc_feature (61)..(62): /note="This region represents a CpG dinucleotide"
  misc_feature (61)..(61): /note="Nucleotide may be methylated to form 5-methylcytosine"
cagttctaacatgttggaggccctgtgtaatgtatacctcaccaaaaatcaacacagacacgtctgaatcatctaccctcttgctccagatatcagaaaagttcacatggtacacatagttt

SEQ ID NO: 2708 - DNA, 122 bp, Homo sapiens
  misc_feature (61)..(62): /note="This region represents a CpG dinucleotide"
  misc_feature (61)..(61): /note="Nucleotide may be methylated to form 5-methylcytosine"
ggtccttttgtgtccagaattggtgcgttctcggtctcactgcctttaagaatgaagcagcgaactgtcgcggtgtttcagttcttaaagatggtgtgtccagagtttgttccttcagatgt

SEQ ID NO: 2709 - DNA, 122 bp, Homo sapiens
  misc_feature (61)..(62): /note="This region represents a CpG dinucleotide"
  misc_feature (61)..(61): /note="Nucleotide may be methylated to form 5-methylcytosine"
tgcctagcaaccggtggtgccaaacactggagctcagagcggggggcgcggagagcgaagcgggaaaggaggtaagggagctagggaagcgggggcgcccccttcctccgcgctggaccggg

SEQ ID NO: 2710 - DNA, 122 bp, Homo sapiens
  misc_feature (61)..(62): /note="This region represents a CpG dinucleotide"
  misc_feature (61)..(61): /note="Nucleotide may be methylated to form 5-methylcytosine"
cctggccaggatggagttcttgtcacaacaaggactcggggcatcttcaggaccagcaagcgtggagatggggtggggtctggcccagacttcagacatggcagaaggctctgaaaacgaag

SEQ ID NO: 2711 - DNA, 122 bp, Homo sapiens
  misc_feature (61)..(62): /note="This region represents a CpG dinucleotide"
  misc_feature (61)..(61): /note="Nucleotide may be methylated to form 5-methylcytosine"
ttgccatactgtactcttcagaaggaagtcactatgtgcagccctcagttaaagagctggcgggaggagttatgtttcacttccttgagggcagagtatttacgtaaattatttggaattct

SEQ ID NO: 2712 - DNA, 122 bp, Homo sapiens
  misc_feature (61)..(62): /note="This region represents a CpG dinucleotide"
  misc_feature (61)..(61): /note="Nucleotide may be methylated to form 5-methylcytosine"
tctgttcacaatgattaacaatccaactggaaacttgtaattgcaaaagccaccctaaatcggtaacttataacttatatattagggcccatgtgacctaataaagaacatctttatccaag

SEQ ID NO: 2713 - DNA, 122 bp, Homo sapiens
  misc_feature (61)..(62): /note="This region represents a CpG dinucleotide"
  misc_feature (61)..(61): /note="Nucleotide may be methylated to form 5-methylcytosine"
atcaccatgcgtagctttagtgatctgagattttatctccagttgtcaataataacgacacgctaggaaaagactgtgttcacttcaaactaaataaaagtgaaggaatctgaatgcttttc

SEQ ID NO: 2714 - DNA, 122 bp, Homo sapiens
  misc_feature (61)..(62): /note="This region represents a CpG dinucleotide"
  misc_feature (61)..(61): /note="Nucleotide may be methylated to form 5-methylcytosine"
cgccaccctcctcgtcccctctcatcacccacctcgttccatgctgtgtgtgcgcattcccgtcgacagagccgtcctgtttacctattgtgttttacaggccgagacagcggctaacagga

SEQ ID NO: 2715 - DNA, 122 bp, Homo sapiens
  misc_feature (61)..(62): /note="This region represents a CpG dinucleotide"
  misc_feature (61)..(61): /note="Nucleotide may be methylated to form 5-methylcytosine"
cccagggaagctaaaagtttggacacccctggttagaccaaggttctcgacacaagcatgcgtcagggttatccagagagttagatgaaacacaggttcctgggctccagggtttctggtcc

SEQ ID NO: 2716 - DNA, 122 bp, Homo sapiens
  misc_feature (61)..(62): /note="This region represents a CpG dinucleotide"
  misc_feature (61)..(61): /note="Nucleotide may be methylated to form 5-methylcytosine"
gggtggtcctcatgaataatgttttgtttggggccaggaacatttttaaggatgtgaaagcgcttgcagcatgaggagaaaatgaaatcttgatactacagttttgtaagatattgaagcga

SEQ ID NO: 2717 - DNA, 122 bp, Homo sapiens
  misc_feature (61)..(62): /note="This region represents a CpG dinucleotide"
  misc_feature (61)..(61): /note="Nucleotide may be methylated to form 5-methylcytosine"
tcaaaatgatataaaatccatttaccatcttcagtttagagcgtacagaggagattagggcgaacaaagaggaagatgtagttaagagaacaggctttggagccagaatcctaggtttaaat

SEQ ID NO: 2718 - DNA, 122 bp, Homo sapiens
  misc_feature (61)..(62): /note="This region represents a CpG dinucleotide"
  misc_feature (61)..(61): /note="Nucleotide may be methylated to form 5-methylcytosine"
cccggtgactcagcttgagtaaaacgcgtgactgtgctcacagacgctatgaaaagtaaacgcagcaccagacattaaacacacatacattgctccccgacaaggctgagaaggctgataag

SEQ ID NO: 2719 - DNA, 122 bp, Homo sapiens
  misc_feature (61)..(62): /note="This region represents a CpG dinucleotide"
  misc_feature (61)..(61): /note="Nucleotide may be methylated to form 5-methylcytosine"
ccctgtagtgacgtccagccggtctcttgctcagtaagcagatctgtaaacatgactcaccgccgctaagcaggtccatcattaatgcagatgcactaactatcttagagctccgaagactc

SEQ ID NO: 2720 - DNA, 122 bp, Homo sapiens
  misc_feature (61)..(62): /note="This region represents a CpG dinucleotide"
  misc_feature (61)..(61): /note="Nucleotide may be methylated to form 5-methylcytosine"
gcagcatcagaacgtgatgtaactctgtgtattcatgtatttcaaacttgtgaagaggaccggtgccatatctgtgccgtgacttaaaagcacgacctgtttcctcaacaagctggtttcct

SEQ ID NO: 2721 - DNA, 122 bp, Homo sapiens
  misc_feature (61)..(62): /note="This region represents a CpG dinucleotide"
  misc_feature (61)..(61): /note="Nucleotide may be methylated to form 5-methylcytosine"
tctgctctccgaccatggacctggtcccagcctctactggctgtgttgcaatgtagtgatcgtgaataagaggtgcagtcaggaagagtcatcttcgctagtgcacaaacaaaagtgtctgt

SEQ ID NO: 2722 - DNA, 122 bp, Homo sapiens
  misc_feature (61)..(62): /note="This region represents a CpG dinucleotide"
  misc_feature (61)..(61): /note="Nucleotide may be methylated to form 5-methylcytosine"
gggaacacactggatacatcagttggtgagccagggaaattagcaggaacgagctcatttcgatagcaatgagctgagtctccctccagctgccagacatttacgaggctggctgggtgccg

SEQ ID NO: 2723 - DNA, 122 bp, Homo sapiens
  misc_feature (61)..(62): /note="This region represents a CpG dinucleotide"
  misc_feature (61)..(61): /note="Nucleotide may be methylated to form 5-methylcytosine"
ttcttttgttttggaattctgaatatgcaactttggatttggtagcctaagcctgaaaagcgactagttgtcagtgagaagtaaagcaaatgtacccagagttgattcagatcttaaaatga

SEQ ID NO: 2724 - DNA, 122 bp, Homo sapiens
  misc_feature (61)..(62): /note="This region represents a CpG dinucleotide"
  misc_feature (61)..(61): /note="Nucleotide may be methylated to form 5-methylcytosine"
gacaataaagatgctgacacagccaaggaactgcagcctgaaaacaaagagttccagaggcgcgtgtgaatctgactggatgtgtcctaaagcctctcattaaacagctactccccatcaaa

SEQ ID NO: 2725 - DNA, 122 bp, Homo sapiens
  misc_feature (61)..(62): /note="This region represents a CpG dinucleotide"
  misc_feature (61)..(61): /note="Nucleotide may be methylated to form 5-methylcytosine"
tctcaaaaaaaaaaaaaaaaaaaaaaaagcaaaggctaggtgcagtggctcacaccagtacgccagtaatcctcagtaatcctaggactttgagaggctgaggtgtgtggatcgcttgagcc

SEQ ID NO: 2726 - DNA, 122 bp, Homo sapiens
  misc_feature (61)..(62): /note="This region represents a CpG dinucleotide"
  misc_feature (61)..(61): /note="Nucleotide may be methylated to form 5-methylcytosine"
agagggaaggaattgggaacccagcaggttggtgtccttggatatgtgccccgcagaagtcgggcagcagttcctggttcgtgtggttacgctagagagaaactgacctggttcatctggtt

SEQ ID NO: 2727 - DNA, 122 bp, Homo sapiens
  misc_feature (61)..(62): /note="This region represents a CpG dinucleotide"
  misc_feature (61)..(61): /note="Nucleotide may be methylated to form 5-methylcytosine"
tgtaagtgagacctttttgtttcttctctttcttttatctatcaagatttccagcccaggcgtggtggctcacacctgtaatcctaagcactgtgggaggctgaggcgcgtggattgcccga

SEQ ID NO: 2728 - DNA, 122 bp, Homo sapiens
  misc_feature (61)..(62): /note="This region represents a CpG dinucleotide"
  misc_feature (61)..(61): /note="Nucleotide may be methylated to form 5-methylcytosine"
tgaggccgccccgctccgtcccgccccgctgacagcggctgggctggagaaggctctatacggacacacctctggggacggggaacccactgctcccagctaaagcaaccctgtttcctggc

SEQ ID NO: 2729 - DNA, 122 bp, Homo sapiens
  misc_feature (61)..(62): /note="This region represents a CpG dinucleotide"
  misc_feature (61)..(61): /note="Nucleotide may be methylated to form 5-methylcytosine"
atttatgtgcttctgtcaaaatacatttattctatcccaagagccccagaagtcttaactcgttccagcattaattcaaaagtctgaagccgagaatctcatctaaatcagatatgagtgag

SEQ ID NO: 2730 - DNA, 122 bp, Homo sapiens
  misc_feature (61)..(62): /note="This region represents a CpG dinucleotide"
  misc_feature (61)..(61): /note="Nucleotide may be methylated to form 5-methylcytosine"
caactctacaagtaggtcctcaaattggtggactcttgattcccttcattgcttacaaaacggtcaattctttttctcagctcatctctttcttgtaatagcttgccaaatgcagccaatag

SEQ ID NO: 2731 - DNA, 122 bp, Homo sapiens
  misc_feature (61)..(62): /note="This region represents a CpG dinucleotide"
  misc_feature (61)..(61): /note="Nucleotide may be methylated to form 5-methylcytosine"
atgcgtgatcacctgaggctttcttccccttttccagtggaacgcccctagaaggtcatacgctgccattttgtctcttaatgcgcatgctcaagcccactggcccaattcctgagatctta

SEQ ID NO: 2732 - DNA, 122 bp, Homo sapiens
  misc_feature (61)..(62): /note="This region represents a CpG dinucleotide"
  misc_feature (61)..(61): /note="Nucleotide may be methylated to form 5-methylcytosine"
ggcgcgtgtagtacttttctgtgacgacctgggccgccttcttcacggtttgggtgtgaacgcggcccatgttggctggtccttggtaaaagaggccctatcagaggtttctaacacacatt

SEQ ID NO: 2733 - DNA, 122 bp, Homo sapiens
  misc_feature (61)..(62): /note="This region represents a CpG dinucleotide"
  misc_feature (61)..(61): /note="Nucleotide may be methylated to form 5-methylcytosine"
tgagggtgactgagatacagccccggcggccttggggagccgagaatcacaagaaaacagcggggctgggaaggaagaagagggctggtggcacgaggagatggatgccaggggtcgggggt

SEQ ID NO: 2734 - DNA, 122 bp, Homo sapiens
  misc_feature (61)..(62): /note="This region represents a CpG dinucleotide"
  misc_feature (61)..(61): /note="Nucleotide may be methylated to form 5-methylcytosine"
gtcaggggcttttctggctaatattaccttaaaatatataaagaaggaatatccatgaaacgaaaagagcagttcagtgttaagcctgacagtgactcactgtacaatggaatgctgacatt

SEQ ID NO: 2735 - DNA, 122 bp, Homo sapiens
  misc_feature (61)..(62): /note="This region represents a CpG dinucleotide"
  misc_feature (61)..(61): /note="Nucleotide may be methylated to form 5-methylcytosine"
tattaacaagactgttcgccagagtactacatgcagcagcttaaaactcaaaggacttggcggtgctttatagccttctagaggagccggttctataattgataaaccccgatatacctcac

SEQ ID NO: 2736 - DNA, 122 bp, Homo sapiens
  misc_feature (61)..(62): /note="This region represents a CpG dinucleotide"
  misc_feature (61)..(61): /note="Nucleotide may be methylated to form 5-methylcytosine"
ttaaaagcggccaagccggctcaacaaacatggccaaatgctgctgctactgtttgctcacgtcgtcgcaaggtaaacattgggcaagtacttgccactctaagtatgatacagatggaaac

SEQ ID NO: 2737 - DNA, 122 bp, Homo sapiens
  misc_feature (61)..(62): /note="This region represents a CpG dinucleotide"
  misc_feature (61)..(61): /note="Nucleotide may be methylated to form 5-methylcytosine"
aggaggcggtgtctgatttacgtggagcccagagattggttcgaccaggggtgacgtttacgtagcgcgcagggaaggctggtcaccccaccctaatcttgttatgcaaataggcttcccac

SEQ ID NO: 2738 - DNA, 122 bp, Homo sapiens
  misc_feature (61)..(62): /note="This region represents a CpG dinucleotide"
  misc_feature (61)..(61): /note="Nucleotide may be methylated to form 5-methylcytosine"
gcagcctcaactgcttctgactggggatgaagagtgacaaacagtcacttttttatttggcggtggagcctatttggtcccacacctgaatgtgacgtgactccaatttttttttttttttt

SEQ ID NO: 2739 - DNA, 122 bp, Homo sapiens
  misc_feature (61)..(62): /note="This region represents a CpG dinucleotide"
  misc_feature (61)..(61): /note="Nucleotide may be methylated to form 5-methylcytosine"
cgcacactgagaggcaaaatggcggagtttcactggtctatgaccttcctctaggaacaccgtgactggtaagggaccacctcaactgagcacgtgcaaaactccagtaaacacactgggca

SEQ ID NO: 2740 - DNA, 122 bp, Homo sapiens
  misc_feature (61)..(62): /note="This region represents a CpG dinucleotide"
  misc_feature (61)..(61): /note="Nucleotide may be methylated to form 5-methylcytosine"
atcaggggaaggagggaagggaaaagtatacatcctgccaccttcttctccaattagctgcgttgacactctgggcttccattagctttctagaaagagtccttaggaaggagagagaggct

SEQ ID NO: 2741 - DNA, 122 bp, Homo sapiens
  misc_feature (61)..(62): /note="This region represents a CpG dinucleotide"
  misc_feature (61)..(61): /note="Nucleotide may be methylated to form 5-methylcytosine"
ttttttcaccatcataatggacttgtttggtctcagtataaaattcacaattcacaatgtcgaatttgttggattattctttatgttttcctgatatttttgtttttctaactataatgaga

SEQ ID NO: 2742 - DNA, 122 bp, Homo sapiens
  misc_feature (61)..(62): /note="This region represents a CpG dinucleotide"
  misc_feature (61)..(61): /note="Nucleotide may be methylated to form 5-methylcytosine"
gtgctagctctgatctctgtgtgcctgtctgtttctagttggccaagagatcttctatcccggccctacgttataggcccccatactataatcagagcaacatcttcagaaagagaaagcaa

SEQ ID NO: 2743 - DNA, 122 bp, Homo sapiens
  misc_feature (61)..(62): /note="This region represents a CpG dinucleotide"
  misc_feature (61)..(61): /note="Nucleotide may be methylated to form 5-methylcytosine"
atatgtcacagtcaggactcaaaggagtgagtcagtgtttcatctgcagtatgcatcattcgatagatgcacactctaagggctgaaccatgcatggattgaagacatctgggaaaagtcac

SEQ ID NO: 2744 - DNA, 122 bp, Homo sapiens
  misc_feature (61)..(62): /note="This region represents a CpG dinucleotide"
  misc_feature (61)..(61): /note="Nucleotide may be methylated to form 5-methylcytosine"
ggcctcagggacttgcaggggccttcccaagggcttcacaggcagaagcatctcctcatgcggcatgtgactcacctgttattgctgcatttgacagggaagacggaacctgagtcactgag

SEQ ID NO: 2745 - DNA, 122 bp, Homo sapiens
  misc_feature (61)..(62): /note="This region represents a CpG dinucleotide"
  misc_feature (61)..(61): /note="Nucleotide may be methylated to form 5-methylcytosine"
catgggactcagctgctggcaggaggccacaaggctgtttgagtgtcctcatgacatggccgctaacgttcccccaaaatgagcaatccaaaagagagagctaggaagaagccacagtgcct

SEQ ID NO: 2746 - DNA, 122 bp, Homo sapiens
  misc_feature (61)..(62): /note="This region represents a CpG dinucleotide"
  misc_feature (61)..(61): /note="Nucleotide may be methylated to form 5-methylcytosine"
ttctgaagcgaaggatcctagctgccgcggctaagggcgcagggggaggccgcgcgtcctcgccacaccggaaggagagggcatccggctcacacatcccaccctatgtcttagaccccgtc

SEQ ID NO: 2747 - DNA, 122 bp, Homo sapiens
  misc_feature (61)..(62): /note="This region represents a CpG dinucleotide"
  misc_feature (61)..(61): /note="Nucleotide may be methylated to form 5-methylcytosine"
attcaactatttggctgataaatcattttaacaatgctgatatgtttattgagtgtctgccggcatcacaatgatatggaaagcgatgccaacttaaatctttgctttgttggtctggtttt

SEQ ID NO: 2748 - DNA, 122 bp, Homo sapiens
  misc_feature (61)..(62): /note="This region represents a CpG dinucleotide"
  misc_feature (61)..(61): /note="Nucleotide may be methylated to form 5-methylcytosine"
aaaaacgtcgttactggggaccctgtgacatttattacactggtgctggtactagcgttacgcacagcaatgctagtcacgttaatgcccaaagtgagcctggtctgctccaaggccttttc

SEQ ID NO: 2749 - DNA, 122 bp, Homo sapiens
  misc_feature (61)..(62): /note="This region represents a CpG dinucleotide"
  misc_feature (61)..(61): /note="Nucleotide may be methylated to form 5-methylcytosine"
tttgtgcctgaatttcctaatctcccaaatagaagcaatatccatgcataagtgagatgacgtataaaatgcctggcgcatggtaggtgtacagtaaatgcagctttccttcccttttctcc

SEQ ID NO: 2750 - DNA, 122 bp, Homo sapiens
  misc_feature (61)..(62): /note="This region represents a CpG dinucleotide"
  misc_feature (61)..(61): /note="Nucleotide may be methylated to form 5-methylcytosine"
tcatggaatactatgaagccataaaaaggaatgagatcatgtcctttgtagggacatggacgaagctggaagctgctattctctgaaaactaatgcaggaacagaaaaccaaacaccgtaag

SEQ ID NO: 2751 - DNA, 122 bp, Homo sapiens
  misc_feature (61)..(62): /note="This region represents a CpG dinucleotide"
  misc_feature (61)..(61): /note="Nucleotide may be methylated to form 5-methylcytosine"
aggaagggcctgatccctcatacctggcctgggcaggtctgtgactacatgtgtatcactcgctttgaacctgataccctataagacaagggaagaaaatctggaaactggcaaaacagtta

SEQ ID NO: 2752 - DNA, 122 bp, Homo sapiens
  misc_feature (61)..(62): /note="This region represents a CpG dinucleotide"
  misc_feature (61)..(61): /note="Nucleotide may be methylated to form 5-methylcytosine"
tttggtttacaaaaaacccatacacccatttcttttttcctctctgataggattagtttccgtcagtacagcttgaatgcccagctgttgctctgggtaattccccagtccttttcttaatc

SEQ ID NO: 2753 - DNA, 122 bp, Homo sapiens
  misc_feature (61)..(62): /note="This region represents a CpG dinucleotide"
  misc_feature (61)..(61): /note="Nucleotide may be methylated to form 5-methylcytosine"
cagatcccctaactcccagtctaaggctctaggttttgccttctttttctttctttctttcgtattattaggctttttgttcaaatgcttggggttgattataggatatgttcatttcaggc

SEQ ID NO: 2754 - DNA, 122 bp, Homo sapiens
  misc_feature (61)..(62): /note="This region represents a CpG dinucleotide"
  misc_feature (61)..(61): /note="Nucleotide may be methylated to form 5-methylcytosine"
aggttgttgatttactcagtcagcacttttaaaaagttttaatccatgcatcagcagcagcgggggatagcaaactatggcctgtgggtcaaacccagcctgctgcctgtttttgtatggcc

SEQ ID NO: 2755 - DNA, 122 bp, Homo sapiens
  misc_feature (61)..(62): /note="This region represents a CpG dinucleotide"
  misc_feature (61)..(61): /note="Nucleotide may be methylated to form 5-methylcytosine"
ggtggagactgccttcctgccaggtcagacagcctgtttttaatcactactctgcagttccgccatgtgatgccaagatggctggttaaagtccaggacaagggaaaaaatggctgactaat

SEQ ID NO: 2756 - DNA, 122 bp, Homo sapiens
  misc_feature (61)..(62): /note="This region represents a CpG dinucleotide"
  misc_feature (61)..(61): /note="Nucleotide may be methylated to form 5-methylcytosine"
gaaatgaaaatgaagtcatcagataccacttcacgcccactaggatggctataatcaaaacgacagacaataacaagagttgacaaagatgtggaaaaattggaaccctcctgttttgctgg

SEQ ID NO: 2757 - DNA, 122 bp, Homo sapiens
  misc_feature (61)..(62): /note="This region represents a CpG dinucleotide"
  misc_feature (61)..(61): /note="Nucleotide may be methylated to form 5-methylcytosine"
tgaccaaggccatcctctcccattattgctcaataatgggcaatggagatggcgtatcttcgcctttatttttgctggcacatccaggccctgaagcacattaaagtaataaaattaggcag

SEQ ID NO: 2758 - DNA, 122 bp, Homo sapiens
  misc_feature (61)..(62): /note="This region represents a CpG dinucleotide"
  misc_feature (61)..(61): /note="Nucleotide may be methylated to form 5-methylcytosine"
aatcttttgtttgggcacacaatgctacccctgcagggatttctgaagctcgctccagagcgtcatggccattgcctgtcagagctctacctcatgcctagaagcagctgctgcttcttcaa

SEQ ID NO: 2759 - DNA, 122 bp, Homo sapiens
  misc_feature (61)..(62): /note="This region represents a CpG dinucleotide"
  misc_feature (61)..(61): /note="Nucleotide may be methylated to form 5-methylcytosine"
gctaaaacttggctaaaagtcttgctgcccctttgtggacagtttgctaactctccatcccggcgacttcacacctcaggttcttgttgttcacgggtgctatcctgtcttatttcacaaat

SEQ ID NO: 2760 - DNA, 122 bp, Homo sapiens
  misc_feature (61)..(62): /note="This region represents a CpG dinucleotide"
  misc_feature (61)..(61): /note="Nucleotide may be methylated to form 5-methylcytosine"
ttccctggctaggtaacacatgtctgtttagctcataaaataaatgaactcccagccaggcgcagtggctcacgcctgtaatcccagcactttgggaggccgaggagggtggatcacgaggt

SEQ ID NO: 2761 - DNA, 122 bp, Homo sapiens
  misc_feature (61)..(62): /note="This region represents a CpG dinucleotide"
  misc_feature (61)..(61): /note="Nucleotide may be methylated to form 5-methylcytosine"
aaaaatttaaaacaccaccatccttgtctcatttttggcttccctcaaagtacatggattcgaaaaccaaatatttaagttagtgtttttttttttttttttttttttaacacttactgtgg

SEQ ID NO: 2762 - DNA, 122 bp, Homo sapiens
  misc_feature (61)..(62): /note="This region represents a CpG dinucleotide"
  misc_feature (61)..(61): /note="Nucleotide may be methylated to form 5-methylcytosine"
tgtggcaacctcaaggtcatcattatgagcagcgcgatgaaaacaaaactttagctggtccgatcctctcataattcccgttactttactgaaagttttagtgctttaactaaaaaaaatta

SEQ ID NO: 2763 - DNA, 122 bp, Homo sapiens
  misc_feature (61)..(62): /note="This region represents a CpG dinucleotide"
  misc_feature (61)..(61): /note="Nucleotide may be methylated to form 5-methylcytosine"
atatatggtaacttccaggccattgctatggcccattgccatggcatgtgtaaactgtcacggcacccatgggaatgtctttatgctaatgagtagtgagggcaactacaggtcactttcat

SEQ ID NO: 2764 - DNA, 122 bp, Homo sapiens
  misc_feature (61)..(62): /note="This region represents a CpG dinucleotide"
  misc_feature (61)..(61): /note="Nucleotide may be methylated to form 5-methylcytosine"
gctggcctttataaaatgcacatgatttcgtctgcgttactgtctgaaattcttccacagcgttcaagcgacatgtttccacaggcagagcaggcaccttcttcccagatcatcttacccat

SEQ ID NO: 2765 - DNA, 122 bp, Homo sapiens
  misc_feature (61)..(62): /note="This region represents a CpG dinucleotide"
  misc_feature (61)..(61): /note="Nucleotide may be methylated to form 5-methylcytosine"
ttcacaaggcgataggaatttttcagctccattataatcatgggactgccttggtatatgcgggctgttgttgacagaaacgtcattatgtcacgcaagactagataatgagggaatccttt

SEQ ID NO: 2766 - DNA, 122 bp, Homo sapiens
  misc_feature (61)..(62): /note="This region represents a CpG dinucleotide"
  misc_feature (61)..(61): /note="Nucleotide may be methylated to form 5-methylcytosine"
catcctcggaggatgatatagaccggcggcccatccggagagtgcgctccaagagcgacacgccgtacctcgcagaggccaggatctcctttaacctgggggcaggtaagaacgcccctggc

SEQ ID NO: 2767 - DNA, 122 bp, Homo sapiens
  misc_feature (61)..(62): /note="This region represents a CpG dinucleotide"
  misc_feature (61)..(61): /note="Nucleotide may be methylated to form 5-methylcytosine"
tgattgtgggagttgacaactcccaaatccataggcaggacaacaggctgtaaactcaggcgagaataatgttgtagtctcgagtttgaaatctacagagcagctggcaggctagcaactca

SEQ ID NO: 2768 - DNA, 122 bp, Homo sapiens
  misc_feature (61)..(62): /note="This region represents a CpG dinucleotide"
  misc_feature (61)..(61): /note="Nucleotide may be methylated to form 5-methylcytosine"
ctggagaatatattttagcatccctgtgatgaaacttgagggctgtttctgcagtaggtgcgacacttgttgacacgacacgctggggaggccctggcaagggggcctggtgaaatgcagcc

SEQ ID NO: 2769 - DNA, 122 bp, Homo sapiens
  misc_feature (61)..(62): /note="This region represents a CpG dinucleotide"
  misc_feature (61)..(61): /note="Nucleotide may be methylated to form 5-methylcytosine"
caaccccaaccagagtgacctgattgagcaggcagccgagatgctttatggattgatccacgcccgctacatccttaccaaccgtggcatcgcccagatggtgaggcctctctgctcctacc

SEQ ID NO: 2770 - DNA, 122 bp, Homo sapiens
  misc_feature (61)..(62): /note="This region represents a CpG dinucleotide"
  misc_feature (61)..(61): /note="Nucleotide may be methylated to form 5-methylcytosine"
tctgcctggtacccataactgtctgtgttttatattatgggcagacaaacactcagatgacgcatggcagcccaagttatgcttgtttgaaaatgcgtggcatttcataatcctgccggaac

SEQ ID NO: 2771 - DNA, 122 bp, Homo sapiens
  misc_feature (61)..(62): /note="This region represents a CpG dinucleotide"
  misc_feature (61)..(61): /note="Nucleotide may be methylated to form 5-methylcytosine"
atggtgtgaaatctgggcaaattatatctacccacaatattacacattcttttttttaaacggtatgagtttactaggtttaagtgtcacgaaagatgaaatatgcaaaaagtaataaattg

SEQ ID NO: 2772 - DNA, 122 bp, Homo sapiens
  misc_feature (61)..(62): /note="This region represents a CpG dinucleotide"
  misc_feature (61)..(61): /note="Nucleotide may be methylated to form 5-methylcytosine"
agaaagagactcaggaggagattgtgtccttctctttctctggatcttgttgtttacattcgaaacctggtcacactgcagtcgtcttagcaccggtttgaagatgaagccaactcagaggg

SEQ ID NO: 2773 - DNA, 122 bp, Homo sapiens
  misc_feature (61)..(62): /note="This region represents a CpG dinucleotide"
  misc_feature (61)..(61): /note="Nucleotide may be methylated to form 5-methylcytosine"
aggcagagttgggaatattacatccattatcattccacaaaatgtaagatcctgtgaggacgcgtggtggcgctgcaggataagaaggcacaaaccagaaccgcagctgcagctccattaac

SEQ ID NO: 2774 - DNA, 122 bp, Homo sapiens
  misc_feature (61)..(62): /note="This region represents a CpG dinucleotide"
  misc_feature (61)..(61): /note="Nucleotide may be methylated to form 5-methylcytosine"
actgattgtacaagttaacaagttagcctgttactatttcatgggtgccagcagaagacacgagactcctgagtcagagaaaaaggactttattactcatagcataacaggaagctggagct

SEQ ID NO: 2775 - DNA, 122 bp, Homo sapiens
  misc_feature (61)..(62): /note="This region represents a CpG dinucleotide"
  misc_feature (61)..(61): /note="Nucleotide may be methylated to form 5-methylcytosine"
atgcagagctgactcaatacgatacagagctgactcaatacgatgtgtgggatcttccatcgtgaagcagctgggagcaccaggaggcaggttttcccgtgcttatggaaagcaccacattg

SEQ ID NO: 2776 - DNA, 122 bp, Homo sapiens
  misc_feature (61)..(62): /note="This region represents a CpG dinucleotide"
  misc_feature (61)..(61): /note="Nucleotide may be methylated to form 5-methylcytosine"
cataacattcctgagtgaagtatgatcagatgctcccaaatgcaatttgccttcttccctcgcatcgtaagagaaaaggcttttgttggatatgttttgtgaacaccaaagagagtaaatag

SEQ ID NO: 2777 - DNA, 122 bp, Homo sapiens
  misc_feature (61)..(62): /note="This region represents a CpG dinucleotide"
  misc_feature (61)..(61): /note="Nucleotide may be methylated to form 5-methylcytosine"
gtagttcccaaccccttgtctagacaaccaatgagacaataaatccagcctgatttgtagcgtttgtttacaaatcagttgctgtggctatttcaagctaacaatgcaaagtcactgcacga

SEQ ID NO: 2778 - DNA, 122 bp, Homo sapiens
  misc_feature (61)..(62): /note="This region represents a CpG dinucleotide"
  misc_feature (61)..(61): /note="Nucleotide may be methylated to form 5-methylcytosine"
gacaaatctggtaacacctatcaatattacatgaacaattccatttattttcctccaacccgatgattcaattaagttatcactcatttttgttcaaatcgtatattctttcttctgtgcca

SEQ ID NO: 2779 - DNA, 122 bp, Homo sapiens
  misc_feature (61)..(62): /note="This region represents a CpG dinucleotide"
  misc_feature (61)..(61): /note="Nucleotide may be methylated to form 5-methylcytosine"
atgtaaggagaaacaggaccctcaatcaattaccgtcggctccaaaatggctgactttagcgaacacagcagaagatgctggctcatcagctctgtgttctaagttaatcccaggaaagcac

SEQ ID NO: 2780 - DNA, 122 bp, Homo sapiens
  misc_feature (61)..(62): /note="This region represents a CpG dinucleotide"
  misc_feature (61)..(61): /note="Nucleotide may be methylated to form 5-methylcytosine"
tatgtagtgagccaattctggaacttcagcgaatttcacagactaaacagtgggagggagcgagcacttgggacttgtgctgactgagcaagcaaagttaccaggtgactgctgggctcaca

SEQ ID NO: 2781 - DNA, 122 bp, Homo sapiens
  misc_feature (61)..(62): /note="This region represents a CpG dinucleotide"
  misc_feature (61)..(61): /note="Nucleotide may be methylated to form 5-methylcytosine"
gactccatcttaaaaaaaaaaaaaaaagaatgtcacataatgaatcatatggcatataaccgtttgagactcagggtaattctcatgagactcatccagcttgttggtgcatcaacagttta

SEQ ID NO: 2782 - DNA, 122 bp, Homo sapiens
  misc_feature (61)..(62): /note="This region represents a CpG dinucleotide"
  misc_feature (61)..(61): /note="Nucleotide may be methylated to form 5-methylcytosine"
accacacagaccacctacgacatgcccaggccatctgacttgtataacctttttgcatagcgaggtgggttttctttccttagctagtagagtgggggaagggaagaatttagcataagaaa

SEQ ID NO: 2783 - DNA, 122 bp, Homo sapiens
  misc_feature (61)..(62): /note="This region represents a CpG dinucleotide"
  misc_feature (61)..(61): /note="Nucleotide may be methylated to form 5-methylcytosine"
ttccacatggtcctccccaattaaaatcttggcagcaacttctaggcttactatctgaggcgttgacaccaaaaacagcatcacaaatttctggctcattacccttaaagacttgtctttgc

SEQ ID NO: 2784 - DNA, 122 bp, Homo sapiens
  misc_feature (61)..(62): /note="This region represents a CpG dinucleotide"
  misc_feature (61)..(61): /note="Nucleotide may be methylated to form 5-methylcytosine"
ttcttcttccttgaattatgactaagaggaattttttccccatgaggttctttcactgctcgtgacttaggtaagaaagtggtcatcatctacgtgcatccttgaagaacatgggtgtgggt

SEQ ID NO: 2785 - DNA, 122 bp, Homo sapiens
  misc_feature (61)..(62): /note="This region represents a CpG dinucleotide"
  misc_feature (61)..(61): /note="Nucleotide may be methylated to form 5-methylcytosine"
gccccatgttaaccatcctgggggatgtcagggcggccacgctgatgcactgcggtcgggcgcagcggcacagccttcagagccgccgccgctcggttccttttcccatgatgttttggact

SEQ ID NO: 2786 - DNA, 122 bp, Homo sapiens
  misc_feature (61)..(62): /note="This region represents a CpG dinucleotide"
  misc_feature (61)..(61): /note="Nucleotide may be methylated to form 5-methylcytosine"
cttaatctgtctctgtccggctgtgtcttgtgccagctcttttcttctctttaaaatgttcgcttttatcacttcctggtattactatttctactatttagtctctgctaattcttctcaaa

SEQ ID NO: 2787 - DNA, 122 bp, Homo sapiens
  misc_feature (61)..(62): /note="This region represents a CpG dinucleotide"
  misc_feature (61)..(61): /note="Nucleotide may be methylated to form 5-methylcytosine"
taaactgatccctgctttcctgtatgcaaattgcattctctttccccacccccacttcaccgaacgtgttgaggtacctagcacctaatcgcggtcagttctacctacctcttcctctcacc

SEQ ID NO: 2788 - DNA, 122 bp, Homo sapiens
  misc_feature (61)..(62): /note="This region represents a CpG dinucleotide"
  misc_feature (61)..(61): /note="Nucleotide may be methylated to form 5-methylcytosine"
gctgcccgtggtcaaactggagtcgctgaagcgctggaacgaagagcggggcctctggtgcgagaagggggtgcaggtgctgctgacgacggtgggcgccttcgccgccttcggcctcatga

SEQ ID NO: 2789 - DNA, 122 bp, Homo sapiens
  misc_feature (61)..(62): /note="This region represents a CpG dinucleotide"
  misc_feature (61)..(61): /note="Nucleotide may be methylated to form 5-methylcytosine"
atggcgtaggtgtgtgcgcgccctcacaaatttatggaatttatgggcggtgagcgcggccggaaaaggtttgggggacaagtaagagagggcgcctgcacgctctctccaggcccgggact

SEQ ID NO: 2790 - DNA, 122 bp, Homo sapiens
  misc_feature (61)..(62): /note="This region represents a CpG dinucleotide"
  misc_feature (61)..(61): /note="Nucleotide may be methylated to form 5-methylcytosine"
acatgggctcttgcagaaaacatctgaagttagttatcccttcctttaatgcatgtgctgcgcttaaccatagcttgtgtcagatcacagccccaaggaataccttcaatggttgcccagag

SEQ ID NO: 2791 - DNA, 122 bp, Homo sapiens
  misc_feature (61)..(62): /note="This region represents a CpG dinucleotide"
  misc_feature (61)..(61): /note="Nucleotide may be methylated to form 5-methylcytosine"
agttctgtcttcttcaaaacatgcccaaacattcttatgttattaggtcttctgaccctgcgccagattgttttgagcaaagttgatcagtctcttcataccaacacatcgctggatgctgc

SEQ ID NO: 2792 - DNA, 122 bp, Homo sapiens
  misc_feature (61)..(62): /note="This region represents a CpG dinucleotide"
  misc_feature (61)..(61): /note="Nucleotide may be methylated to form 5-methylcytosine"
ctctaaactggaagctccacctaatgtctggtgagacccaggttcaggtttttggaagagcgtatcgcagctggtgcctgtgcgtcacggtgctgccccgcaggaggtcacctactgggaat

SEQ ID NO: 2793 - DNA, 122 bp, Homo sapiens
  misc_feature (61)..(62): /note="This region represents a CpG dinucleotide"
  misc_feature (61)..(61): /note="Nucleotide may be methylated to form 5-methylcytosine"
cccgccaggtcttggcactgctggcgcggccgcggcggcgggggcccggctccagatcaccgacccccacgagcgccggccctgcctgcccgctattttggttccatctcttctgcatattt

SEQ ID NO: 2794 - DNA, 122 bp, Homo sapiens
  misc_feature (61)..(62): /note="This region represents a CpG dinucleotide"
  misc_feature (61)..(61): /note="Nucleotide may be methylated to form 5-methylcytosine"
gagccttatcagctataattagacatttggctcgtatcctacgtgcagttggtgcatgctcgctctcgctcgttctctctggttctgtctccccacccccacccacttgggtgatattttaa

SEQ ID NO: 2795 - DNA, 122 bp, Homo sapiens
  misc_feature (61)..(62): /note="This region represents a CpG dinucleotide"
  misc_feature (61)..(61): /note="Nucleotide may be methylated to form 5-methylcytosine"
ttgcagaacctgttgctatatcctttccaattatacagaaagcaacctatctcctttctgcgtcagattcatgaatcggctttaggaattttcaggcaccataaaactctgctaaatcactt

SEQ ID NO: 2796 - DNA, 122 bp, Homo sapiens
  misc_feature (61)..(62): /note="This region represents a CpG dinucleotide"
  misc_feature (61)..(61): /note="Nucleotide may be methylated to form 5-methylcytosine"
attactcgctcaccacaaaggtctttgccattcagttcataaacagcatcatctgcatcacgcagatcatcaaactccacaaaaccatatctagaagagagcaaagaaaatactggttggta

SEQ ID NO: 2797 - DNA, 122 bp, Homo sapiens
  misc_feature (61)..(62): /note="This region represents a CpG dinucleotide"
  misc_feature (61)..(61): /note="Nucleotide may be methylated to form 5-methylcytosine"
tctccaggcttccctctcctcctccttctgcctctcccctgtccccgttccattctcctgcgcccctcgccagcgcgctcgcagcccatcggctcctgccggggcccctctggtgccagccg

SEQ ID NO: 2798 - DNA, 122 bp, Homo sapiens
  misc_feature (61)..(62): /note="This region represents a CpG dinucleotide"
  misc_feature (61)..(61): /note="Nucleotide may be methylated to form 5-methylcytosine"
gacaaaaaaagaagacaacccgggaaggagtgggctgcaatcccactctcgtcacgatgacgatgctcccattccaggcctgcctctgggagacagtggccatagccccctcagctccgcca

SEQ ID NO: 2799 - DNA, 122 bp, Homo sapiens
  misc_feature (61)..(62): /note="This region represents a CpG dinucleotide"
  misc_feature (61)..(61): /note="Nucleotide may be methylated to form 5-methylcytosine"
aggaaagagatggcactgtttgtctcaaagtcccagctgaaccccaggttcttcccaccacgctacactactacatgcctaagcaggagtgggaacagagatgacagaatgcatttctgcca

SEQ ID NO: 2800 - DNA, 122 bp, Homo sapiens
  misc_feature (61)..(62): /note="This region represents a CpG dinucleotide"
  misc_feature (61)..(61): /note="Nucleotide may be methylated to form 5-methylcytosine"
tgctggtggaggaggagcagcagcatcgagaagtctatcgttggccattctcggggaggccgtgagggtgggagatgctgttacagagcggggtggtgggggtggggggagctgatagtaat

SEQ ID NO: 2801 - DNA, 122 bp, Homo sapiens
  misc_feature (61)..(62): /note="This region represents a CpG dinucleotide"
  misc_feature (61)..(61): /note="Nucleotide may be methylated to form 5-methylcytosine"
ccccatcccattctatgatcctctgctcgtctctctgaaacattaacaagcactcacatgcggaaaggcttttaagtttataggcgatttcacgtgtcgtatcttagtacttatcaccctgg

SEQ ID NO: 2802 - DNA, 122 bp, Homo sapiens
  misc_feature (61)..(62): /note="This region represents a CpG dinucleotide"
  misc_feature (61)..(61): /note="Nucleotide may be methylated to form 5-methylcytosine"
agggtactttatctcgtgcacacctatatgttccattatgccatatttacatttgtttaacgcatttaattaagaacattgttaaaaatttaaaaagacttcccctttcacgaaatttggaa

SEQ ID NO: 2803 - DNA, 122 bp, Homo sapiens
  misc_feature (61)..(62): /note="This region represents a CpG dinucleotide"
  misc_feature (61)..(61): /note="Nucleotide may be methylated to form 5-methylcytosine"
aaataggtttaattgactcgcaccacatggctgcagaggcctcacaatcatggctgaaggcgaatgaagagcagagtcacatctttcatggtggctggcaggagagagcttgagcaggggaa

SEQ ID NO: 2804 - DNA, 122 bp, Homo sapiens
  misc_feature (61)..(62): /note="This region represents a CpG dinucleotide"
  misc_feature (61)..(61): /note="Nucleotide may be methylated to form 5-methylcytosine"
gtttagtcgcttatctgcaggaagcaacactcacctcagagaaggaaacctcaaaccactcgcatgagagttagctcccatagaggtagtgagagctgcctctgaaccacagaagtacttac

SEQ ID NO: 2805 - DNA, 122 bp, Homo sapiens
  misc_feature (61)..(62): /note="This region represents a CpG dinucleotide"
  misc_feature (61)..(61): /note="Nucleotide may be methylated to form 5-methylcytosine"
tctttacataaatacccgttttatcacctgccaggaatgtcacttgtttacttgcattaacgacatcttgataaaaatcaaactatcttgttaattagagccagagaaggagtttggatccc

SEQ ID NO: 2806 - DNA, 122 bp, Homo sapiens
  misc_feature (61)..(62): /note="This region represents a CpG dinucleotide"
  misc_feature (61)..(61): /note="Nucleotide may be methylated to form 5-methylcytosine"
gtacctggcatagggcttttggcgtcatactccaattcattttccctacaggacatgatccgtgacttagtcatcatgttattaacattaaactttatagtgcagagatgagtcggggaaga

SEQ ID NO: 2807 - DNA, 122 bp, Homo sapiens
  misc_feature (61)..(62): /note="This region represents a CpG dinucleotide"
  misc_feature (61)..(61): /note="Nucleotide may be methylated to form 5-methylcytosine"
tgggcttaagcgatctgcctcagcctcccaagtagctgggactacagatgtgtgccaccacgcctggctaaatttgtttaaaattttttttgtagagatggggtctccctatgttgcccagg

SEQ ID NO: 2808 - DNA, 122 bp, Homo sapiens
  misc_feature (61)..(62): /note="This region represents a CpG dinucleotide"
  misc_feature (61)..(61): /note="Nucleotide may be methylated to form 5-methylcytosine"
cccggcccacgccccgctgcagccacccgtccagcagcgccgactccccggggctccgcccgggccctgccgccggcccccccgccacaccgccagcaccccgcccctccaactccatccac

SEQ ID NO: 2809 - DNA, 122 bp, Homo sapiens
  misc_feature (61)..(62): /note="This region represents a CpG dinucleotide"
  misc_feature (61)..(61): /note="Nucleotide may be methylated to form 5-methylcytosine"
ctagttacagtgggctgagatagaaagggcagcaggactgagaaactgttgcatctgatgcggtttaacaggtttaccgtatcactgtggttaagaacctaggctctgtagcctcattgcct

SEQ ID NO: 2810 - DNA, 122 bp, Homo sapiens
  misc_feature (61)..(62): /note="This region represents a CpG dinucleotide"
  misc_feature (61)..(61): /note="Nucleotide may be methylated to form 5-methylcytosine"
cggccttcagcttccttgctagctgcagggtggccagtttagaaacatctctattactggcgtgtggctttttaatactgcttctctccgaggcagactatccttgggcatgcgttcctgtg

SEQ ID NO: 2811 - DNA, 122 bp, Homo sapiens
  misc_feature (61)..(62): /note="This region represents a CpG dinucleotide"
  misc_feature (61)..(61): /note="Nucleotide may be methylated to form 5-methylcytosine"
gttgaccttctctgacaggttatgatgcagcaagaaagcccttgccagaagccagggccacgctcttgaatgtcccagcctacagatccatgagacaattcaacctcttttcttataaattc

SEQ ID NO: 2812 - DNA, 122 bp, Homo sapiens
  misc_feature (61)..(62): /note="This region represents a CpG dinucleotide"
  misc_feature (61)..(61): /note="Nucleotide may be methylated to form 5-methylcytosine"
gatcaaggcattgacagggttggtttcttctgaggcctctgtccttgacttgtagattgccgtcttctcttgtgtcttcatatggtcttccctctgtaccgtctgtacccaaatttcctctt

SEQ ID NO: 2813 - DNA, 122 bp, Homo sapiens
  misc_feature (61)..(62): /note="This region represents a CpG dinucleotide"
  misc_feature (61)..(61): /note="Nucleotide may be methylated to form 5-methylcytosine"
ctcactatgagcactcaccttaaaggttattatctgcctcttgaagaagcacttactcagcggatcctgtaacatgtggttctgccactttgtccataactgattagaccagggcaagcctc

SEQ ID NO: 2814 - DNA, 122 bp, Homo sapiens
  misc_feature (61)..(62): /note="This region represents a CpG dinucleotide"
  misc_feature (61)..(61): /note="Nucleotide may be methylated to form 5-methylcytosine"
agaaaagtcaggaagttaagacacttgccaaaagctacggagtgtgttttatgagagctgcgattaagatgaggccagatctttgcctcaagttctgcgctcatagttctcctgcttcatga

SEQ ID NO: 2815 - DNA, 122 bp, Homo sapiens
  misc_feature (61)..(62): /note="This region represents a CpG dinucleotide"
  misc_feature (61)..(61): /note="Nucleotide may be methylated to form 5-methylcytosine"
aggatgggttggatgggtcactgcagatgggaatcctcattacccaaggaccaagacgaccgccttctccagagctgtacaggcagctgataaaaggactatgggggaggtgggacaatcca

SEQ ID NO: 2816 - DNA, 122 bp, Homo sapiens
  misc_feature (61)..(62): /note="This region represents a CpG dinucleotide"
  misc_feature (61)..(61): /note="Nucleotide may be methylated to form 5-methylcytosine"
tctaagaactcattcttggcgttcactgcaagctataagctctgcaagtggtgaccccgacgtgatcgccttgaagttacgcttgaaggaggaaaactcatcaattttcggggaatcccggt

SEQ ID NO: 2817 - DNA, 122 bp, Homo sapiens
  misc_feature (61)..(62): /note="This region represents a CpG dinucleotide"
  misc_feature (61)..(61): /note="Nucleotide may be methylated to form 5-methylcytosine"
tgggaccttgctcagaatccctaggtctctccacatgagcttgggtagcagctggtaagacgtggcaggattacctaatatgtccgttttcttgttggggtatcagcacagcctcagtggtg

SEQ ID NO: 2818 - DNA, 122 bp, Homo sapiens
  misc_feature (61)..(62): /note="This region represents a CpG dinucleotide"
  misc_feature (61)..(61): /note="Nucleotide may be methylated to form 5-methylcytosine"
cactggaccatcacagcacatgttccccagatctgaggctcagcatgtccaaaatgctgacggagcacctgctacacaccaggactaggtacgtagtatgagtgtactaactgggttcctgc

SEQ ID NO: 2819 - DNA, 122 bp, Homo sapiens
  misc_feature (61)..(62): /note="This region represents a CpG dinucleotide"
  misc_feature (61)..(61): /note="Nucleotide may be methylated to form 5-methylcytosine"
catttttccagcaactgcagttcatgtgagcaggaaggcatacagcatggccgagctccacggtgggcggaggggaggacagaaaagggactgagaaaaggatggaaggggctgggtgtgga

SEQ ID NO: 2820 - DNA, 122 bp, Homo sapiens
  misc_feature (61)..(62): /note="This region represents a CpG dinucleotide"
  misc_feature (61)..(61): /note="Nucleotide may be methylated to form 5-methylcytosine"
gaaggggctggttggaaccggtggcaagaggctgtggcgggactcaggcctccccgcagtcggctccacaatctgcgccccaagttcgccttgcccagcccagcctcagtccccttcagcca

SEQ ID NO: 2821 - DNA, 122 bp, Homo sapiens
  misc_feature (61)..(62): /note="This region represents a CpG dinucleotide"
  misc_feature (61)..(61): /note="Nucleotide may be methylated to form 5-methylcytosine"
ttaactaaagcaatcttttctttccttgttatttagaagtaaaatagcttgtaatcccatcgctttgggaggccaatgtggaaaatctcttgaagtcgggagtttgagaccagcctgggcaa

SEQ ID NO: 2822 - DNA, 122 bp, Homo sapiens
  misc_feature (61)..(62): /note="This region represents a CpG dinucleotide"
  misc_feature (61)..(61): /note="Nucleotide may be methylated to form 5-methylcytosine"
tgaatgatggatgactaattgactgaatgaaaatgcatgaatcgcaaaaagaaaaagaggcgtaaagagattaataacaccaaggttatccagctcataggtggtggatctatatcttaaat

SEQ ID NO: 2823 - DNA, 122 bp, Homo sapiens
  misc_feature (61)..(62): /note="This region represents a CpG dinucleotide"
  misc_feature (61)..(61): /note="Nucleotide may be methylated to form 5-methylcytosine"
cctggagctagcgaacagcgagcccctctaacctgaaacggagcctcatccactgcttggcgctaatcctctgcacaatgaaagccgaactaattcactgggtaaacaccctctccagttac

SEQ ID NO: 2824 - DNA, 122 bp, Homo sapiens
  misc_feature (61)..(62): /note="This region represents a CpG dinucleotide"
  misc_feature (61)..(61): /note="Nucleotide may be methylated to form 5-methylcytosine"
gcgcgggtcgggggccggacgccgagcgggcaatgcggctgacggagagtgaaagtgcggcggtgggaggcgcgcgccgggcgctttagaggggagagccaggcggggcggggcggggcgcg

SEQ ID NO: 2825 - DNA, 122 bp, Homo sapiens
  misc_feature (61)..(62): /note="This region represents a CpG dinucleotide"
  misc_feature (61)..(61): /note="Nucleotide may be methylated to form 5-methylcytosine"
tctgctgaaatggatgctctgatgctctgaagcttctgggaggccgggctctggaggcaacgtgctgcaggcgcactctgtcagagtgaacagcacccgcgagacaggccaggctcctggct

SEQ ID NO: 2826 - DNA, 122 bp, Homo sapiens
  misc_feature (61)..(62): /note="This region represents a CpG dinucleotide"
  misc_feature (61)..(61): /note="Nucleotide may be methylated to form 5-methylcytosine"
ccgcgaaccgggaggagcgcgggccccaccctaaagagggcgcagccgggagctggggagcgggtgccgcgctccagagattgtgtcgtgggcgccgtcctagtggcggggagcgcacctcc

SEQ ID NO: 2827 - DNA, 122 bp, Homo sapiens
  misc_feature (61)..(62): /note="This region represents a CpG dinucleotide"
  misc_feature (61)..(61): /note="Nucleotide may be methylated to form 5-methylcytosine"
gtgaaatctggcaccatcccattcagtcccacgagggacatgaatcatctctttgtccagcgtctccacactgtcttccctcccctggtgtgagtcacttggtagccgccttgattttcaga

SEQ ID NO: 2828 - DNA, 122 bp, Homo sapiens
  misc_feature (61)..(62): /note="This region represents a CpG dinucleotide"
  misc_feature (61)..(61): /note="Nucleotide may be methylated to form 5-methylcytosine"
ctattaatgcctgctaatgcttctcgtgcagacttggtataaatcttgccagagtctgtacgttcagtagtatctgtctaagagtttcagctgtttgtctttaaagttggagaggtgctatt

SEQ ID NO: 2829 - DNA, 122 bp, Homo sapiens
  misc_feature (61)..(62): /note="This region represents a CpG dinucleotide"
  misc_feature (61)..(61): /note="Nucleotide may be methylated to form 5-methylcytosine"
ggcactggcattaggctggttccccacttctgtaggttattatgctggacataaagcctgcgtttgctgtcgagccgccctctttctgtgtgtgtgtgtgtgtgtgtgtgtgtctttcttta

SEQ ID NO: 2830 - DNA, 122 bp, Homo sapiens
  misc_feature (61)..(62): /note="This region represents a CpG dinucleotide"
  misc_feature (61)..(61): /note="Nucleotide may be methylated to form 5-methylcytosine"
cttacaatcagggtctgcaaaacctttctagaggaggagctaaggcaagcttgtccaacccgcagcccaggacggctctgaatacggcctgtttacgaacacaaatttgtaaactttcttag

SEQ ID NO: 2831 - DNA, 122 bp, Homo sapiens
  misc_feature (61)..(62): /note="This region represents a CpG dinucleotide"
  misc_feature (61)..(61): /note="Nucleotide may be methylated to form 5-methylcytosine"
ataattccaacaccttgggaggccaaggctggcagatggcctgagcccagaagaccagcccggacaacatagtgaggccccctcaccaatctctacaaaaaaataaaaaaattagccaggtg

SEQ ID NO: 2832 - DNA, 122 bp, Homo sapiens
  misc_feature (61)..(62): /note="This region represents a CpG dinucleotide"
  misc_feature (61)..(61): /note="Nucleotide may be methylated to form 5-methylcytosine"
accttgtgatccgcccaccttggcctcccaaagtgctgggattacaggcgtgagccaccacgcccggccaattcatatgggttttagtgtgttcacaatgttattgtgaccatcaccactat

SEQ ID NO: 2833 - DNA, 122 bp, Homo sapiens
  misc_feature (61)..(62): /note="This region represents a CpG dinucleotide"
  misc_feature (61)..(61): /note="Nucleotide may be methylated to form 5-methylcytosine"
ggctggagtgcagtggctttgccttccagattcaagctattcttgtgcctcagcctcctgcgtagctgggattacaggtgcgtgccaccatgcctggctaatttttgcatttttagtagaga

SEQ ID NO: 2834 - DNA, 122 bp, Homo sapiens
  misc_feature (61)..(62): /note="This region represents a CpG dinucleotide"
  misc_feature (61)..(61): /note="Nucleotide may be methylated to form 5-methylcytosine"
acatggcacagtttcactttcactctacccagctcttactgccagacatcctttagaacacgctcacaaacactagctggaactgggctggcattaatagcaagccagttatcagtgctgac

SEQ ID NO: 2835 - DNA, 122 bp, Homo sapiens
  misc_feature (61)..(62): /note="This region represents a CpG dinucleotide"
  misc_feature (61)..(61): /note="Nucleotide may be methylated to form 5-methylcytosine"
ctatggtcagaagaaagaaacgtatccaaatattcaacagcatgtgtgatctgtcacccccgctactcaccccagtgtgaaaatgtgcctatggttgagaaagaataagcagcctcgtatga

SEQ ID NO: 2836 - DNA, 122 bp, Homo sapiens
  misc_feature (61)..(62): /note="This region represents a CpG dinucleotide"
  misc_feature (61)..(61): /note="Nucleotide may be methylated to form 5-methylcytosine"
ctttcctggagaggaggccgcgggagtcatcgcggggcagatcctggaggccagcaaggccgcccctcctcctaagtggcactgattgacaggggagaaagacagaggcttgttccccagaa

SEQ ID NO: 2837 - DNA, 122 bp, Homo sapiens
  misc_feature (61)..(62): /note="This region represents a CpG dinucleotide"
  misc_feature (61)..(61): /note="Nucleotide may be methylated to form 5-methylcytosine"
tatcctgggtgcaaaggggcttgctgagctcaagtgttgcagaatatagcccggtggttccgggcctttttccttatgtcaggatgtcatattctcagtgcattctgtaagaaatctgggtg

SEQ ID NO: 2838 - DNA, 122 bp, Homo sapiens
  misc_feature (61)..(62): /note="This region represents a CpG dinucleotide"
  misc_feature (61)..(61): /note="Nucleotide may be methylated to form 5-methylcytosine"
tatagtttggaattaacagtcctgtgtgcctgcctgtttatccagtatcactaatgtcagcgcaaccaggagacatctaagggcacctggcttgcgacaagaggcagggcggaggcaagcag

SEQ ID NO: 2839 - DNA, 122 bp, Homo sapiens
  misc_feature (61)..(62): /note="This region represents a CpG dinucleotide"
  misc_feature (61)..(61): /note="Nucleotide may be methylated to form 5-methylcytosine"
ctcggaaggggcaggggaatgagcccagggaccccagcggggcgcaggtaggaggctgtgcgctcgccgggtgcgctccggccccgattcccagcgcagccagtaagtggcgctgggcctcg

SEQ ID NO: 2840 - DNA, 122 bp, Homo sapiens
  misc_feature (61)..(62): /note="This region represents a CpG dinucleotide"
  misc_feature (61)..(61): /note="Nucleotide may be methylated to form 5-methylcytosine"
ttagtaacccacagactaggagatcctctcccatgcctggctcggtgggtcccacacccacggagccttgtcactgctagtgtagcagtctaagatcaacctgcaaggctgcagcccagtca

SEQ ID NO: 2841 - DNA, 122 bp, Homo sapiens
  misc_feature (61)..(62): /note="This region represents a CpG dinucleotide"
  misc_feature (61)..(61): /note="Nucleotide may be methylated to form 5-methylcytosine"
caggagatcccgagttacagacctgagctcgtaaacaaacgctcaccactttacagtcgccgcctcatcctgaaactccggtcagaaatgctggaaggcctttgctaatgcgcagtgaaaat

SEQ ID NO: 2842 - DNA, 122 bp, Homo sapiens
  misc_feature (61)..(62): /note="This region represents a CpG dinucleotide"
  misc_feature (61)..(61): /note="Nucleotide may be methylated to form 5-methylcytosine"
catctttttttttctttttttgagacagagtctggttctgttgcccaggctggagtgcagcggcacgatcatgcctcagtgcagccttgaattcccaggctgaagagaccctctcacttcag

SEQ ID NO: 2843 - DNA, 122 bp, Homo sapiens
  misc_feature (61)..(62): /note="This region represents a CpG dinucleotide"
  misc_feature (61)..(61): /note="Nucleotide may be methylated to form 5-methylcytosine"
ggaatatcttgttggaaaatgccgtctttccagtttttatatcaccattgctgtgttcctcgcagaagcatttttctcaatagactcatttccttaaattcggattctttgcatgtgcttgt

SEQ ID NO: 2844 - DNA, 122 bp, Homo sapiens
  misc_feature (61)..(62): /note="This region represents a CpG dinucleotide"
  misc_feature (61)..(61): /note="Nucleotide may be methylated to form 5-methylcytosine"
gacagacatatttaacatgatttggcaagctaagagtaaacctagggataaaaagataagcgattactaagaggtagcaataagaataatttattgagagtatataatgggccagagacagt

SEQ ID NO: 2845 - DNA, 122 bp, Homo sapiens
  misc_feature (61)..(62): /note="This region represents a CpG dinucleotide"
  misc_feature (61)..(61): /note="Nucleotide may be methylated to form 5-methylcytosine"
ctttctattgcagcaagttggctgccttctgactaacattttactcatttctctaatcagcgggaaaaaaataaaataatatttttcaaaaatttacaaatgtctgaatatacatgagagta

SEQ ID NO: 2846 - DNA, 122 bp, Homo sapiens
  misc_feature (61)..(62): /note="This region represents a CpG dinucleotide"
  misc_feature (61)..(61): /note="Nucleotide may be methylated to form 5-methylcytosine"
tcactatcgtcttccagactattggaggtattgctgttcatttctgactcagtcctggcccggtaggctgcatcctcagcgattttgccgaggtttaacaatgacttggccaccagttcatc

SEQ ID NO: 2847 - DNA, 122 bp, Homo sapiens
  misc_feature (61)..(62): /note="This region represents a CpG dinucleotide"
  misc_feature (61)..(61): /note="Nucleotide may be methylated to form 5-methylcytosine"
tctggaagatcatcgcagaaccagtaacatgacccatcgcctccacaaggcgcggcgtctcgactgttcttagagtgtatttctagtaaaatcagaagctcaccaaagcaacatgcttgaga

SEQ ID NO: 2848 - DNA, 122 bp, Homo sapiens
  misc_feature (61)..(62): /note="This region represents a CpG dinucleotide"
  misc_feature (61)..(61): /note="Nucleotide may be methylated to form 5-methylcytosine"
cctatatctgtcttaccttgtagggatatgttcccttttatgtcaatgcaactgctggcacgactgtttatggagcttttgatccgatacaagagattgcagatatatgtgagaaatataac

SEQ ID NO: 2849 - DNA, 122 bp, Homo sapiens
  misc_feature (61)..(62): /note="This region represents a CpG dinucleotide"
  misc_feature (61)..(61): /note="Nucleotide may be methylated to form 5-methylcytosine"
aagcttcactaaggctgagaagcaacttaagctgtcaggaataggtgttagtactgaggacggggcagctcactctggccccatgtttagactcctgtcttcattgtcctgactcctgaaga

SEQ ID NO: 2850 - DNA, 122 bp, Homo sapiens
  misc_feature (61)..(62): /note="This region represents a CpG dinucleotide"
  misc_feature (61)..(61): /note="Nucleotide may be methylated to form 5-methylcytosine"
ttgatttataaattctacactaagctagacaaaatccaatcaggtttgtggcgggtagtgcggaggactgcttataagctgagtgcagaatttttattgaaattcaaaggatcacgaaagcc

SEQ ID NO: 2851 - DNA, 122 bp, Homo sapiens
  misc_feature (61)..(62): /note="This region represents a CpG dinucleotide"
  misc_feature (61)..(61): /note="Nucleotide may be methylated to form 5-methylcytosine"
agactggattagttgttataaagtgaggtccctccctgtgtttgcctccttgcacatgcccgtctgcctttctgcttctgccatgtcttgatgcagcagatggccctcatcagaagccaaaa

SEQ ID NO: 2852 - DNA, 122 bp, Homo sapiens
  misc_feature (61)..(62): /note="This region represents a CpG dinucleotide"
  misc_feature (61)..(61): /note="Nucleotide may be methylated to form 5-methylcytosine"
tggccctgaagctctgcttttggctgcagctggttcccaggctcctgcattggaatcgggcggaagaggaggattctgaatgatctgattaggcagtcgagagcagccatggatcttggcaa

SEQ ID NO: 2853 - DNA, 122 bp, Homo sapiens
  misc_feature (61)..(62): /note="This region represents a CpG dinucleotide"
  misc_feature (61)..(61): /note="Nucleotide may be methylated to form 5-methylcytosine"
ctgtcagccagaggtcaatctttgatcctgcaggctgctctcatttcttctgaaattttccgtgtgttactctccagcaacggcagggtgagtccccctcacattttaaattgctctcactt

SEQ ID NO: 2854 - DNA, 122 bp, Homo sapiens
  misc_feature (61)..(62): /note="This region represents a CpG dinucleotide"
  misc_feature (61)..(61): /note="Nucleotide may be methylated to form 5-methylcytosine"
tagtcaaatgtggagtaatcagaactctataatggctctagagtagagtagtatcaaaaacgtacatggcacacagaattcctggagtgctgactgctgttcatgtgtctggtcttagcctg

SEQ ID NO: 2855 - DNA, 122 bp, Homo sapiens
  misc_feature (61)..(62): /note="This region represents a CpG dinucleotide"
  misc_feature (61)..(61): /note="Nucleotide may be methylated to form 5-methylcytosine"
ggcccaggccgggaggcggcaaggagctgccgggggcggctggccgggggatcggggggccggaagagttttcgcctctccccagctctgaaagcgccgcgctgtctcgtcaactgggtgcc

SEQ ID NO: 2856 - DNA, 122 bp, Homo sapiens
  misc_feature (61)..(62): /note="This region represents a CpG dinucleotide"
  misc_feature (61)..(61): /note="Nucleotide may be methylated to form 5-methylcytosine"
attctagcttccgattatacctttgagctttaatgtctcttggctgcagaactgatcccccgtttcagctttctgtgttcatgctgccattgcatagactagaacggccatttcatgtcacc

SEQ ID NO: 2857 - DNA, 122 bp, Homo sapiens
  misc_feature (61)..(62): /note="This region represents a CpG dinucleotide"
  misc_feature (61)..(61): /note="Nucleotide may be methylated to form 5-methylcytosine"
gactggaaatcctaagtaccatcttccttcaacacagctaatccattcttacatgcctgtcgcacaaaagagagcaacaagtcatggtgtgggtgtggccctcatgggagttggtggcagca

SEQ ID NO: 2858 - DNA, 122 bp, Homo sapiens
  misc_feature (61)..(62): /note="This region represents a CpG dinucleotide"
  misc_feature (61)..(61): /note="Nucleotide may be methylated to form 5-methylcytosine"
cctgggcaacagagcaagactctgtctcagaaaagaaaagaacacatcttcttctatccacgaaactgtggagaaggaaaaagaatctgcactagttttgctgtcgcaactcaaaactacag

SEQ ID NO: 2859 - DNA, 122 bp, Homo sapiens
  misc_feature (61)..(62): /note="This region represents a CpG dinucleotide"
  misc_feature (61)..(61): /note="Nucleotide may be methylated to form 5-methylcytosine"
tgccccccgcccccgcattgccacctcttcttttttttctgcacacttacattttttgtacgcttgccatttatacttcggttttctgcactgttaaaacaattccatggctctgttcaaat

SEQ ID NO: 2860 - DNA, 122 bp, Homo sapiens
  misc_feature (61)..(62): /note="This region represents a CpG dinucleotide"
  misc_feature (61)..(61): /note="Nucleotide may be methylated to form 5-methylcytosine"
gtggacagtccaacagagttacatcatctgttccaaacacccttgtaatggttgtatcagcgtcaatgtctgagttgctgtcctggttctcctggccagtcctcagctggccatgcctgttc

SEQ ID NO: 2861 - DNA, 122 bp, Homo sapiens
  misc_feature (61)..(62): /note="This region represents a CpG dinucleotide"
  misc_feature (61)..(61): /note="Nucleotide may be methylated to form 5-methylcytosine"
ttcaacatatccgtgggaggccagatcttgagacagatttcccagatgatactcatctgccgttgcaaatgctgtgcagtgcattaggtcctgttccagggaaatgagcataacatgggtta

SEQ ID NO: 2862 - DNA, 122 bp, Homo sapiens
  misc_feature (61)..(62): /note="This region represents a CpG dinucleotide"
  misc_feature (61)..(61): /note="Nucleotide may be methylated to form 5-methylcytosine"
ctgccactccaccacttcatggagtcagctcatctacaccacgggccaaacacttctggacgggagaccagatataaattaaggcaaggctgctgctgtcagatacatccccacctctccac

SEQ ID NO: 2863 - DNA, 122 bp, Homo sapiens
  misc_feature (61)..(62): /note="This region represents a CpG dinucleotide"
  misc_feature (61)..(61): /note="Nucleotide may be methylated to form 5-methylcytosine"
ccagggatgtaactgtgaaatccatccacagttctaactttgaaagtcagaatgacacctcgcagggatcagtgagagagggactatccctccccacaagacagggaggaggctggagagga

SEQ ID NO: 2864 - DNA, 122 bp, Homo sapiens
  misc_feature (61)..(62): /note="This region represents a CpG dinucleotide"
  misc_feature (61)..(61): /note="Nucleotide may be methylated to form 5-methylcytosine"
aagataatactcttaaacaagaaaaatttttacatagttaagacataataccaagacttacgggatgcagcaaagacagtgctcagaaggaaatttacagctgtaaatgcttacattaagaa

SEQ ID NO: 2865 - DNA, 122 bp, Homo sapiens
  misc_feature (61)..(62): /note="This region represents a CpG dinucleotide"
  misc_feature (61)..(61): /note="Nucleotide may be methylated to form 5-methylcytosine"
aagtagtctcaactttagcctttttgactcaaaatatcccagacctggcaatggaatgagcgggattatctgcctttttgtttcacggcagtccagtcattctgaatgttacctttggtgtt

SEQ ID NO: 2866 - DNA, 122 bp, Homo sapiens
  misc_feature (61)..(62): /note="This region represents a CpG dinucleotide"
  misc_feature (61)..(61): /note="Nucleotide may be methylated to form 5-methylcytosine"
acatgcttgtcaggtgagtgtgcttttccctctcatgagttcgctgaattaaagggaaagcgtgttgtgtgacatggagtcactgagtcattaacctagtcttatgggaatttggcttacac

SEQ ID NO: 2867 - DNA, 122 bp, Homo sapiens
  misc_feature (61)..(62): /note="This region represents a CpG dinucleotide"
  misc_feature (61)..(61): /note="Nucleotide may be methylated to form 5-methylcytosine"
agaacttgctttgacagagctgttccagctcatttgtaataacatgcttagaaccttctgcgttcaagagcatgtcagaagggaatgcctggtcgttgtctccctgggaagcagcgtggagc

SEQ ID NO: 2868 - DNA, 122 bp, Homo sapiens
  misc_feature (61)..(62): /note="This region represents a CpG dinucleotide"
  misc_feature (61)..(61): /note="Nucleotide may be methylated to form 5-methylcytosine"
gtgtgttattcccctcttggtgtccatgtgttttcagtgttcaactcccacttataagtgcgaacatgtgattttggttttctgttcctgtgttactttgctgaggatgatgacttccagct

SEQ ID NO: 2869 - DNA, 122 bp, Homo sapiens
  misc_feature (61)..(62): /note="This region represents a CpG dinucleotide"
  misc_feature (61)..(61): /note="Nucleotide may be methylated to form 5-methylcytosine"
acgttcagcatgttcagctctcctgttctttgttctccattttaaagtttaaaacttcctcgttctttatgtctccttgcccctagtttcagtaaacaaccccctcttagcctctatcatct

SEQ ID NO: 2870 - DNA, 122 bp, Homo sapiens
  misc_feature (61)..(62): /note="This region represents a CpG dinucleotide"
  misc_feature (61)..(61): /note="Nucleotide may be methylated to form 5-methylcytosine"
ccaccccgggctctgaagccaggaaacccaagaggaaatgactgagcccgtctgggtccccgcccgctcgcgctcccctggccacaccctccgcctggacgcagcagccaccgccgcgtccc

SEQ ID NO: 2871 - DNA, 122 bp, Homo sapiens
  misc_feature (61)..(62): /note="This region represents a CpG dinucleotide"
  misc_feature (61)..(61): /note="Nucleotide may be methylated to form 5-methylcytosine"
cgagccagaattgcaggacctgctaccttgcgctctgctgtgcatacaaagctattaagtcgtcataaaatcagtctgctgttttaccagttagtgggatgtggcagaaagggagaaagtgc

SEQ ID NO: 2872 - DNA, 122 bp, Homo sapiens
  misc_feature (61)..(62): /note="This region represents a CpG dinucleotide"
  misc_feature (61)..(61): /note="Nucleotide may be methylated to form 5-methylcytosine"
tgactaatgtaaataccttcctgctttataagtcccacacaaagcaattgtgttcatatgcgtgtttttcatggcactccttgaatcagcttggagtcactacaaattattatgggtaataa

SEQ ID NO: 2873 - DNA, 122 bp, Homo sapiens
  misc_feature (61)..(62): /note="This region represents a CpG dinucleotide"
  misc_feature (61)..(61): /note="Nucleotide may be methylated to form 5-methylcytosine"
ggagagggcggcctgggccgaagtgaggcgacgcggggcggcggagtctgagggccggagcggagcggaggcgacgcggggaggggcgagggatcgcggccggtggctgggggccacctgct

SEQ ID NO: 2874 - DNA, 122 bp, Homo sapiens
  misc_feature (61)..(62): /note="This region represents a CpG dinucleotide"
  misc_feature (61)..(61): /note="Nucleotide may be methylated to form 5-methylcytosine"
aatagttaggcaaatatgttttcaaataaaatacaaagtttacacttgttttgcctaacacggttgtacaggccaatgattaaatgcaccaactttggaatcaagatttcctggattcaaat

SEQ ID NO: 2875 - DNA, 122 bp, Homo sapiens
  misc_feature (61)..(62): /note="This region represents a CpG dinucleotide"
  misc_feature (61)..(61): /note="Nucleotide may be methylated to form 5-methylcytosine"
aattgaatatgatgtcagcatggaacaatctaatgattcattaagagtcaaccataatgacggtgaagagtcaaaaaccagtgctcaagtatttgaggtatggattcagctgggaacctttt

SEQ ID NO: 2876 - DNA, 122 bp, Homo sapiens
  misc_feature (61)..(62): /note="This region represents a CpG dinucleotide"
  misc_feature (61)..(61): /note="Nucleotide may be methylated to form 5-methylcytosine"
atgaggctcaaaacataagaagtaaagaaatgggcaaaattcaattagtttctggtgaaacgtcctaaatccaaaagaaaggtgaccagaaatagagaaaacggagtgtgatcttttgcatt

SEQ ID NO: 2877 - DNA, 122 bp, Homo sapiens
  misc_feature (61)..(62): /note="This region represents a CpG dinucleotide"
  misc_feature (61)..(61): /note="Nucleotide may be methylated to form 5-methylcytosine"
cttggagcgggagggcggggcggggcagggcgggggcgcaggccacgcgggggcgcagggcgcgagggtgcggcgcaggctggggtcccggcggcgggtcctcgcggccggtgccggctcgt

SEQ ID NO: 2878 - DNA, 122 bp, Homo sapiens
  misc_feature (61)..(62): /note="This region represents a CpG dinucleotide"
  misc_feature (61)..(61): /note="Nucleotide may be methylated to form 5-methylcytosine"
gtcaccgtctgtctcccacacactcggtcacattttcacacaagtcaaatcacacgaggacggaactgggggaagtaaccatgcagtcatttcccaggggtacaaagaaactcacatagagc

SEQ ID NO: 2879 - DNA, 122 bp, Homo sapiens
  misc_feature (61)..(62): /note="This region represents a CpG dinucleotide"
  misc_feature (61)..(61): /note="Nucleotide may be methylated to form 5-methylcytosine"
actcgagtgagaggggcggagtttagagccctgggggagccgtagcgggcgcggaaggggcggggcctaacggtagggggcggggctcgtcaaagggcggggtttagagtccccgaggctac

SEQ ID NO: 2880 - DNA, 122 bp, Homo sapiens
  misc_feature (61)..(62): /note="This region represents a CpG dinucleotide"
  misc_feature (61)..(61): /note="Nucleotide may be methylated to form 5-methylcytosine"
ttgtggcctcggtgttggtgggcagagggccaggcacggctgttggccattttttcatgtcggctgctgtgtatcgggtgtgtgggttgattttccgcttcagtatttgagctctgtgttct

SEQ ID NO: 2881 - DNA, 122 bp, Homo sapiens
  misc_feature (61)..(62): /note="This region represents a CpG dinucleotide"
  misc_feature (61)..(61): /note="Nucleotide may be methylated to form 5-methylcytosine"
tctcaagatcgggatgaacctgggaatgacgctaaatgatacaaaaataacacacatcaccgcaaaagaaaagatgcatgcacggacgttcagagaaactgcaaaccctgacacccttatgc

SEQ ID NO: 2882 - DNA, 122 bp, Homo sapiens
  misc_feature (61)..(62): /note="This region represents a CpG dinucleotide"
  misc_feature (61)..(61): /note="Nucleotide may be methylated to form 5-methylcytosine"
gactatggttgctaaccaagaaggaacacagatattttgtgaatgagaacatcaaaagcacggaattttgtatgttaattggcacaagtccagatattcaattccctcgctgattttaaaac

SEQ ID NO: 2883 - DNA, 122 bp, Homo sapiens
  misc_feature (61)..(62): /note="This region represents a CpG dinucleotide"
  misc_feature (61)..(61): /note="Nucleotide may be methylated to form 5-methylcytosine"
gtccgtccatgttgtcataaatgacagggtttccttctttttaaaagctaaatcaaattccgctgtgtataaataccacattttctttatccattcatctgttttggacacttaggttgatt

SEQ ID NO: 2884 - DNA, 122 bp, Homo sapiens
  misc_feature (61)..(62): /note="This region represents a CpG dinucleotide"
  misc_feature (61)..(61): /note="Nucleotide may be methylated to form 5-methylcytosine"
tgatcttaccgcgttcacatattttaactgggcaggaagactcatattaaataaccagaacgcaaagtcctaagtgctgtttgcaaaaggagtccagttcatgtgctccgggatcccagtcc

SEQ ID NO: 2885 - DNA, 122 bp, Homo sapiens
  misc_feature (61)..(62): /note="This region represents a CpG dinucleotide"
  misc_feature (61)..(61): /note="Nucleotide may be methylated to form 5-methylcytosine"
cctgtgtggtctcggcccccagacttcctcatcttcactggtgtaatggtgtacttggtacgactcttccaggacacaaagttggcattaagggccacagaagtaagaactgggcggcaggg

SEQ ID NO: 2886 - DNA, 122 bp, Homo sapiens
  misc_feature (61)..(62): /note="This region represents a CpG dinucleotide"
  misc_feature (61)..(61): /note="Nucleotide may be methylated to form 5-methylcytosine"
cacaaaggcaccatttatgggggctgtgtacccacgtgggcaccccgcgcacaggcagtgcggcgtcctgctaggtgcacagctttataccacttacaggttgcaagtagcaacgagaaaaa

SEQ ID NO: 2887 - DNA, 122 bp, Homo sapiens
  misc_feature (61)..(62): /note="This region represents a CpG dinucleotide"
  misc_feature (61)..(61): /note="Nucleotide may be methylated to form 5-methylcytosine"
ttaccagggtgctcctttaggcctggctctgacatcttcattcacctgctgtgtgtgtgacgctttaaaatccaaagctttgaaagtactgtgttattagtcacttccaaatgtaattttcc

SEQ ID NO: 2888 - DNA, 122 bp, Homo sapiens
  misc_feature (61)..(62): /note="This region represents a CpG dinucleotide"
  misc_feature (61)..(61): /note="Nucleotide may be methylated to form 5-methylcytosine"
atgacagacacccctggtaacccagcagcaccgtagcctctgccctgtaaaaatcagactcggaaccgatgtgtgctttagggaattttaagttgcatgcatttcagagactttaagtcagt

SEQ ID NO: 2889 - DNA, 122 bp, Homo sapiens
  misc_feature (61)..(62): /note="This region represents a CpG dinucleotide"
  misc_feature (61)..(61): /note="Nucleotide may be methylated to form 5-methylcytosine"
tttctgcagcccctgcaggtcaacccttgactgacctccatttactcatacttagattaccgaaagctctccattttcccctgtaaaacacaaatacggagaatcaaatgtactgctgactc

SEQ ID NO: 2890 - DNA, 122 bp, Homo sapiens
  misc_feature (61)..(62): /note="This region represents a CpG dinucleotide"
  misc_feature (61)..(61): /note="Nucleotide may be methylated to form 5-methylcytosine"
gtgagccagcaagtacttctgactcaacctggacatccaaatccatctgggtcgctactgcggttttgcagttgctactgaagtttaaacacctgtggagacactactgggtcttgaggctg

SEQ ID NO: 2891 - DNA, 122 bp, Homo sapiens
  misc_feature (61)..(62): /note="This region represents a CpG dinucleotide"
  misc_feature (61)..(61): /note="Nucleotide may be methylated to form 5-methylcytosine"
caaccaaagctctccccttcagcagcagcttgaggcagtcgggctggttgtagagtgctgcgtagtgcagagccgtgttcccgtcagcagccttggcatccaggtgaccactggggagagga

SEQ ID NO: 2892 - DNA, 122 bp, Homo sapiens
  misc_feature (61)..(62): /note="This region represents a CpG dinucleotide"
  misc_feature (61)..(61): /note="Nucleotide may be methylated to form 5-methylcytosine"
aaaagtacagtcaaggccttgtactgcctggatcctatactcaaaaagttaattctatctcgcaatatatatttaatacaattcagttaagcttcctctaaataattcatttagtttagttt

SEQ ID NO: 2893 - DNA, 122 bp, Homo sapiens
  misc_feature (61)..(62): /note="This region represents a CpG dinucleotide"
  misc_feature (61)..(61): /note="Nucleotide may be methylated to form 5-methylcytosine"
gcacgctcgtcctgtgcatgtaccccatgccatctggctccatgtcgttgggagtgttgtcgtagtcactctcaggtgtgctgttctgcttctccagcctggatgcctacaagaaagaagag

SEQ ID NO: 2894 - DNA, 122 bp, Homo sapiens
  misc_feature (61)..(62): /note="This region represents a CpG dinucleotide"
  misc_feature (61)..(61): /note="Nucleotide may be methylated to form 5-methylcytosine"
gagttagctcacttaatcctgtaaatctctgcaaagactaactttgttccctggctcctccgtggttgccaggtggtggatatacattctacaacagaagaaactggaatcgctagaggtgt

SEQ ID NO: 2895 - DNA, 122 bp, Homo sapiens
  misc_feature (61)..(62): /note="This region represents a CpG dinucleotide"
  misc_feature (61)..(61): /note="Nucleotide may be methylated to form 5-methylcytosine"
caagcctgagatcttggatcacacacattgtgcatggtgtttaacggaagcaccttgcaccggcatgcaggtagcaggctccaaactgcaccccaaatccctagtcattccaagttgcgctc

SEQ ID NO: 2896 - DNA, 122 bp, Homo sapiens
  misc_feature (61)..(62): /note="This region represents a CpG dinucleotide"
  misc_feature (61)..(61): /note="Nucleotide may be methylated to form 5-methylcytosine"
taggaagagggaggaggagaaaagctgggatatttctgcctgcagtggctattcctgcagcgattatgttttatccatggttgtagctcctgccaggcagcctgtaccatggctttacctct

SEQ ID NO: 2897 - DNA, 122 bp, Homo sapiens
  misc_feature (61)..(62): /note="This region represents a CpG dinucleotide"
  misc_feature (61)..(61): /note="Nucleotide may be methylated to form 5-methylcytosine"
acatatgctaaatcgacagacatccaattcccaccaagagcaaaagaataaacattctttcgcagggccctaaagccagaaagcagtgaaagaattagaaccattttatctcaattcacaaa

SEQ ID NO: 2898 - DNA, 122 bp, Homo sapiens
  misc_feature (61)..(62): /note="This region represents a CpG dinucleotide"
  misc_feature (61)..(61): /note="Nucleotide may be methylated to form 5-methylcytosine"
atgaacattttttcatactgggaccctgatattctactttaggatctggggagtttattacgtgcattttaaaagatgctgttatcggccgggcatggtgactcatgcctgtaatcccagca

SEQ ID NO: 2899 - DNA, 122 bp, Homo sapiens
  misc_feature (61)..(62): /note="This region represents a CpG dinucleotide"
  misc_feature (61)..(61): /note="Nucleotide may be methylated to form 5-methylcytosine"
tgcaggtggaggtgaccccaagatatggtgacacaagtctgaagtatagaaaagatgtctcggatggagaatagttgagtcattgtgtaggaaacgtttagatttatcataaaggaagatta

SEQ ID NO: 2900 - DNA, 122 bp, Homo sapiens
  misc_feature (61)..(62): /note="This region represents a CpG dinucleotide"
  misc_feature (61)..(61): /note="Nucleotide may be methylated to form 5-methylcytosine"
aaaggaccaatagcacgactcagcttgttctttctggcttagaaaacagagttcccatagcggcctgctcagccaagtcagtgcagaaaaggacaatgatgaagcgaataatggggctatta

SEQ ID NO: 2901 - DNA, 122 bp, Homo sapiens
  misc_feature (61)..(62): /note="This region represents a CpG dinucleotide"
  misc_feature (61)..(61): /note="Nucleotide may be methylated to form 5-methylcytosine"
gggctgctggtgccttgagtcccacagatgattcattaggaaaagccagatataccaaagcggtttactcagagtcaggggtgtagctctggctgcctgtcagctcccttggatactatatt

SEQ ID NO: 2902 - DNA, 122 bp, Homo sapiens
  misc_feature (61)..(62): /note="This region represents a CpG dinucleotide"
  misc_feature (61)..(61): /note="Nucleotide may be methylated to form 5-methylcytosine"
gttcctcggaaaatgttcttgttatgggcatcgatgacccctggtaaatccggtggacaccgtgacattatgcacgtgattcttgtgttgcaacccacacttttgacttttcccagcttatc

SEQ ID NO: 2903 - DNA, 122 bp, Homo sapiens
  misc_feature (61)..(62): /note="This region represents a CpG dinucleotide"
  misc_feature (61)..(61): /note="Nucleotide may be methylated to form 5-methylcytosine"
atcacataaacaaaaccaatgacaaaaaccacatgattatatcaatgcagaaaaggccttcgacaaaattcagcagcccttcatgctaaaagctcgcaataaactaggtattgatggaacgt

SEQ ID NO: 2904 - DNA, 122 bp, Homo sapiens
  misc_feature (61)..(62): /note="This region represents a CpG dinucleotide"
  misc_feature (61)..(61): /note="Nucleotide may be methylated to form 5-methylcytosine"
gtagggagaggcttttccttcacctctggcagaaaaggtttgctggggcccttcacctcccgacatcagagctgcacttcaatgtggaagctttggtcatgtgtggctcctgagtgcctgga

SEQ ID NO: 2905 - DNA, 122 bp, Homo sapiens
  misc_feature (61)..(62): /note="This region represents a CpG dinucleotide"
  misc_feature (61)..(61): /note="Nucleotide may be methylated to form 5-methylcytosine"
aggaattagtgactcatatgaaaagcacctcggacttgctcatgaagattctgagatcctcgtcaacttggtacttgatctctgaatttccgttctaccctcagtcctcttgggccttggtt

SEQ ID NO: 2906 - DNA, 122 bp, Homo sapiens
  misc_feature (61)..(62): /note="This region represents a CpG dinucleotide"
  misc_feature (61)..(61): /note="Nucleotide may be methylated to form 5-methylcytosine"
ctctgtttttgagcacatctggagtgactcacggggcatgtgatctccttggcagtggggcggataaatataatttctgtacttgagttccatgtgttggatgcacccactggaatttttct

SEQ ID NO: 2907 - DNA, 122 bp, Homo sapiens
  misc_feature (61)..(62): /note="This region represents a CpG dinucleotide"
  misc_feature (61)..(61): /note="Nucleotide may be methylated to form 5-methylcytosine"
ttaagctgttcacattattgtgttataaaaccagcacaccaaggctttttatgtttttatcgtgtgtggaaatgaagaaaatggctaggcaaacctacagtaggcagaacacaaatagctgg

SEQ ID NO: 2908 - DNA, 122 bp, Homo sapiens
  misc_feature (61)..(62): /note="This region represents a CpG dinucleotide"
  misc_feature (61)..(61): /note="Nucleotide may be methylated to form 5-methylcytosine"
cctcccatatatcctgaatcctgggaattctgaaatagctaagatgtgattataggctctcgggaacttttataaggaatacatacagaaataatgattgtagtggtatcttgtattaaaac

SEQ ID NO: 2909 - DNA, 122 bp, Homo sapiens
  misc_feature (61)..(62): /note="This region represents a CpG dinucleotide"
  misc_feature (61)..(61): /note="Nucleotide may be methylated to form 5-methylcytosine"
ctccagggtgttcccagtcattttcacattagcagttgctctgtggtacagacgtggctgcgcctctgtggatcattgaaccttcaccattgccccagcctgcttggggctagggtgtgtgg

SEQ ID NO: 2910 - DNA, 122 bp, Homo sapiens
  misc_feature (61)..(62): /note="This region represents a CpG dinucleotide"
  misc_feature (61)..(61): /note="Nucleotide may be methylated to form 5-methylcytosine"
ccgagagccccgcctgcaggcggtgtagatacatgtagatactgtagatactgtagataccgccccggcgccgacttgataaacggtttcgcctcttttggaagccgcctgcgtgtccattt

SEQ ID NO: 2911 - DNA, 122 bp, Homo sapiens
  misc_feature (61)..(62): /note="This region represents a CpG dinucleotide"
  misc_feature (61)..(61): /note="Nucleotide may be methylated to form 5-methylcytosine"
tcagcatttgaaggacctttagggtctctgcatctcaagaaagtttttgcaattccctagcggaagatccacacagaagccaggacgctttgcaatgaggctcttggttttttttttttttt

SEQ ID NO: 2912 - DNA, 122 bp, Homo sapiens
  misc_feature (61)..(62): /note="This region represents a CpG dinucleotide"
  misc_feature (61)..(61): /note="Nucleotide may be methylated to form 5-methylcytosine"
tactgtacacgtggctggcagagaagaggcgatgaagccgccatcttgaacatgtctagtcggtagttccctgtggcatttacccgtgcaagctcccagcttgtttgtgtctgcagctccac

SEQ ID NO: 2913 - DNA, 122 bp, Homo sapiens
  misc_feature (61)..(62): /note="This region represents a CpG dinucleotide"
  misc_feature (61)..(61): /note="Nucleotide may be methylated to form 5-methylcytosine"
tgattcttgctaagcttgcaatgttcttgcaatgatcaatactggtagccactccattaccgtacccacggtttagaaggtagtttgtatttttccttctttttcttttaccacaaacttta

SEQ ID NO: 2914 - DNA, 122 bp, Homo sapiens
  misc_feature (61)..(62): /note="This region represents a CpG dinucleotide"
  misc_feature (61)..(61): /note="Nucleotide may be methylated to form 5-methylcytosine"
gaggctgacactcaggctgactcttaaaattggttcccctccagcacctcacaaatcacacgtccttggcaaagcagtgcagattaaacaagccaactgttgtttgcacgtcatgaggtgga

SEQ ID NO: 2915 - DNA, 122 bp, Homo sapiens
  misc_feature (61)..(62): /note="This region represents a CpG dinucleotide"
  misc_feature (61)..(61): /note="Nucleotide may be methylated to form 5-methylcytosine"
caaagacccactcttcttagtcctaggagtgactcatggcaaatgctaaatgtgtctgcacgtgtgtgtttgtgcaagtgcatttgtgcacacgctaagcatttgaaacaagtcttacagat

SEQ ID NO: 2916 - DNA, 122 bp, Homo sapiens
  misc_feature (61)..(62): /note="This region represents a CpG dinucleotide"
  misc_feature (61)..(61): /note="Nucleotide may be methylated to form 5-methylcytosine"
aaaaaagaaaggagtctttcagaagccacacaggcccaattttccatagtataatgaagtcgcaatgtcactgccatttctccacttctgcaggggaagccaagactgctttttgctcactg

SEQ ID NO: 2917 - DNA, 122 bp, Homo sapiens
  misc_feature (61)..(62): /note="This region represents a CpG dinucleotide"
  misc_feature (61)..(61): /note="Nucleotide may be methylated to form 5-methylcytosine"
attttcatgtgatgattcacactggcgtatcaggtctaaattgaaagtctgtatttgtatcgccttgtctctgtgtaagtgaggtacttttaactagtttgacatttatccttttagtcttt

SEQ ID NO: 2918 - DNA, 122 bp, Homo sapiens
  misc_feature (61)..(62): /note="This region represents a CpG dinucleotide"
  misc_feature (61)..(61): /note="Nucleotide may be methylated to form 5-methylcytosine"
agtgaatgattacagatatatacaggtctgtttggccaagaatgagtatacagacgatctcggcatgcagtgtcaggttgaagtgcaaataaatgtgagatgccagagcactcatcacattc

SEQ ID NO: 2919 - DNA, 122 bp, Homo sapiens
  misc_feature (61)..(62): /note="This region represents a CpG dinucleotide"
  misc_feature (61)..(61): /note="Nucleotide may be methylated to form 5-methylcytosine"
gaaagtttacgaatttgtgttgggtcgcattcaaagctgtcctgggtcccatgcggcccgcgggttagacaacttgctgtaaacagtacaagccagtaatggagtttcacctgtcattttca

SEQ ID NO: 2920 - DNA, 122 bp, Homo sapiens
  misc_feature (61)..(62): /note="This region represents a CpG dinucleotide"
  misc_feature (61)..(61): /note="Nucleotide may be methylated to form 5-methylcytosine"
gcagggcgctgttgagtgcagcggggcggggccgggcgcgggggtggggcgagcggcgggcggggcggggcggccggccggggggtgggaggagaggggcggggcgggccggccgggggagg

SEQ ID NO: 2921 - DNA, 122 bp, Homo sapiens
  misc_feature (61)..(62): /note="This region represents a CpG dinucleotide"
  misc_feature (61)..(61): /note="Nucleotide may be methylated to form 5-methylcytosine"
gggctggctcagctggctaaaggacttgccatcctgtgagattcattcagcttctttgtccgctgttctccaagggccgcaatgtagtgaaatgctctggcctaggaaccttacaaggtagg

SEQ ID NO: 2922 - DNA, 122 bp, Homo sapiens
  misc_feature (61)..(62): /note="This region represents a CpG dinucleotide"
  misc_feature (61)..(61): /note="Nucleotide may be methylated to form 5-methylcytosine"
atctcaaccaggctcactcacccttctccagtgaagttggcacatgttaaccatattgatcgtctgattacaaatgtagactgtggcagggagtatttacaaaaggaacccatttgtccctg

SEQ ID NO: 2923 - DNA, 122 bp, Homo sapiens
  misc_feature (61)..(62): /note="This region represents a CpG dinucleotide"
  misc_feature (61)..(61): /note="Nucleotide may be methylated to form 5-methylcytosine"
gctcagccggtatgtgctggatgaatgacagagccatgttatacagaaaacgcagtttgacggttgctctctgggactctgttctccaaatcagatggaggagacaactaagtagactccca

SEQ ID NO: 2924 - DNA, 122 bp, Homo sapiens
  misc_feature (61)..(62): /note="This region represents a CpG dinucleotide"
  misc_feature (61)..(61): /note="Nucleotide may be methylated to form 5-methylcytosine"
gaaccacaataagatgtgcaaacctgggactagatgcagagaatgttaccatgggaagcacggcaaaactgtcagcatcagataaagccctgcttaaatgtgcagaggagatcaaaaagtca

SEQ ID NO: 2925 - DNA, 122 bp, Homo sapiens
  misc_feature (61)..(62): /note="This region represents a CpG dinucleotide"
  misc_feature (61)..(61): /note="Nucleotide may be methylated to form 5-methylcytosine"
ccacccctccccaggcctggtggaataggcagttaaaaacagaaatctcaccaggtcctacgtagaggagccacagttaacattgaattggcaaatggaaaaacaggaagagaagccttggg

SEQ ID NO: 2926 - DNA, 122 bp, Homo sapiens
  misc_feature (61)..(62): /note="This region represents a CpG dinucleotide"
  misc_feature (61)..(61): /note="Nucleotide may be methylated to form 5-methylcytosine"
gtggattctgtaagctgagcctcatctggagcttgagtccgcacctccctgcagaattgccgggcttcatgcaggcaatcagctgcctgtgattggagggctggtgctggtagggataatga

SEQ ID NO: 2927 - DNA, 122 bp, Homo sapiens
  misc_feature (61)..(62): /note="This region represents a CpG dinucleotide"
  misc_feature (61)..(61): /note="Nucleotide may be methylated to form 5-methylcytosine"
tccactgccttctctgctcccgccaaggcctttcctgactcggggccaaccctcccggtacgacatgccccggcaaccaagtcctggcctgggagcccaccctcagccccacttcccaaccg

SEQ ID NO: 2928 - DNA, 122 bp, Homo sapiens
  misc_feature (61)..(62): /note="This region represents a CpG dinucleotide"
  misc_feature (61)..(61): /note="Nucleotide may be methylated to form 5-methylcytosine"
tctaccactttctagctgggtgacctagggcaatttactcacactcttcatgttttagttcgctcatctgtaagtgggacttgtcatcaactgtacattgtgagattttcctaggaataaat

SEQ ID NO: 2929 - DNA, 122 bp, Homo sapiens
  misc_feature (61)..(62): /note="This region represents a CpG dinucleotide"
  misc_feature (61)..(61): /note="Nucleotide may be methylated to form 5-methylcytosine"
ttttggctctgagaatggaatcccagagctggagacgagctggatggttcctgtgaatgacggctttctccaggaggagaattagagctaaaattccaggcaaatctgaaggaaagacatgt

SEQ ID NO: 2930 - DNA, 122 bp, Homo sapiens
  misc_feature (61)..(62): /note="This region represents a CpG dinucleotide"
  misc_feature (61)..(61): /note="Nucleotide may be methylated to form 5-methylcytosine"
tcggtgaagccttttgtgggcctgacatctaactctgtgcctgcgcagccagggtgtgtgcgtgtgtgtgtgtgagcgcgcgtgggggtgaacaggtgtgcacaggctctcggcacgggtgg

SEQ ID NO: 2931 - DNA, 122 bp, Homo sapiens
  misc_feature (61)..(62): /note="This region represents a CpG dinucleotide"
  misc_feature (61)..(61): /note="Nucleotide may be methylated to form 5-methylcytosine"
ggctcatcgcagccattgtcatgcaagcacagttgtaagtaataatgtggcctttaatgacggaatgatggacctgccaaacacttgctcctgccatggactgcttgcatttccctgctgga

SEQ ID NO: 2932 - DNA, 122 bp, Homo sapiens
  misc_feature (61)..(62): /note="This region represents a CpG dinucleotide"
  misc_feature (61)..(61): /note="Nucleotide may be methylated to form 5-methylcytosine"
aaccccatctctgcaaaaattacaaataattagccaagcaggtgtggtggcatgcacctacggtcccagctactcaggaagctgaagtgaaagaatcgcctgatcccaggccaaggaagtca

SEQ ID NO: 2933 - DNA, 122 bp, Homo sapiens
  misc_feature (61)..(62): /note="This region represents a CpG dinucleotide"
  misc_feature (61)..(61): /note="Nucleotide may be methylated to form 5-methylcytosine"
agctgatggatgtgggtctgattgcaattcggtgatgacttgttcatccccccttcccttcgccctcatgtggaaagaggagctgggaccgcggcgagcagcacggagcggaagggagagca

SEQ ID NO: 2934 - DNA, 122 bp, Homo sapiens
  misc_feature (61)..(62): /note="This region represents a CpG dinucleotide"
  misc_feature (61)..(61): /note="Nucleotide may be methylated to form 5-methylcytosine"
ggaattacaggcgtgagccaccatgcctggctatacttcttagcttacttttttattacgcgtatatattaagaacttttaaaagtccaaattaaagaagcatgcctagacatcattaaaat

SEQ ID NO: 2935 - DNA, 122 bp, Homo sapiens
  misc_feature (61)..(62): /note="This region represents a CpG dinucleotide"
  misc_feature (61)..(61): /note="Nucleotide may be methylated to form 5-methylcytosine"
ctggaaacttctgtttcttcctcctttgaacctagtcgccatgctgtgaataagccatgacgcaacatggacaggcccacatggagggcaactgaggttattccaaatatcagcagccaccg

SEQ ID NO: 2936 - DNA, 122 bp, Homo sapiens
  misc_feature (61)..(62): /note="This region represents a CpG dinucleotide"
  misc_feature (61)..(61): /note="Nucleotide may be methylated to form 5-methylcytosine"
tacaagtttatccataaaaccgtgagctccacttgactgtcagccaagagctgcaaagagcgggcccacagtctactaggacatttttgtttggcgagcagtgttttttgttctgtttgtgc

SEQ ID NO: 2937 - DNA, 122 bp, Homo sapiens
  misc_feature (61)..(62): /note="This region represents a CpG dinucleotide"
  misc_feature (61)..(61): /note="Nucleotide may be methylated to form 5-methylcytosine"
ctccttatggctgagtcactctggaatttttctctctcaaacttatctacactgggcctccggcaattcaattacagttcaggttttcctgccctagccctggttcctgctgagatttcttt

SEQ ID NO: 2938 - DNA, 122 bp, Homo sapiens
  misc_feature (61)..(62): /note="This region represents a CpG dinucleotide"
  misc_feature (61)..(61): /note="Nucleotide may be methylated to form 5-methylcytosine"
gtaaattgtgaaaggccttagagcccattttaagaacttggactatttctctgtgtgcagcggaaaccactgagttgtgaatggagagggaacacaagtgatcttatattttgaaggaccct

SEQ ID NO: 2939 - DNA, 122 bp, Homo sapiens
  misc_feature (61)..(62): /note="This region represents a CpG dinucleotide"
  misc_feature (61)..(61): /note="Nucleotide may be methylated to form 5-methylcytosine"
taaaaatcagtgacatgattttctatgaagatgtctaatgtttaattttccaaagttctacgtaatccacaaggagagacgtaataaaatggatatgatttaacaggagcggcttcatgatt

SEQ ID NO: 2940 - DNA, 122 bp, Homo sapiens
  misc_feature (61)..(62): /note="This region represents a CpG dinucleotide"
  misc_feature (61)..(61): /note="Nucleotide may be methylated to form 5-methylcytosine"
tctccactttgccgttcgaaaatgcctaggttggtggatcgaccctccgcggagcaaagacggatggctggcaggagcaggttcaggagctgggccaaggtattctctgcttccgcctttgt

SEQ ID NO: 2941 - DNA, 122 bp, Homo sapiens
  misc_feature (61)..(62): /note="This region represents a CpG dinucleotide"
  misc_feature (61)..(61): /note="Nucleotide may be methylated to form 5-methylcytosine"
ccaaaaaaaaaaaatgtcattttcacatggctgtacatcataaacactttcccacgttatcgcaggctttgtgtttattcgttggaaggctgtggaatgccttttccttctgttagacattt

SEQ ID NO: 2942 - DNA, 122 bp, Homo sapiens
  misc_feature (61)..(62): /note="This region represents a CpG dinucleotide"
  misc_feature (61)..(61): /note="Nucleotide may be methylated to form 5-methylcytosine"
gttgttccacagtagtgaatttagagggcagcatgatataattgaacacattggagactgcgaacaaaatatctggaatagagtctctgctctgcatctggtgatttcagggtgtggtcatc

SEQ ID NO: 2943 - DNA, 122 bp, Homo sapiens
  misc_feature (61)..(62): /note="This region represents a CpG dinucleotide"
  misc_feature (61)..(61): /note="Nucleotide may be methylated to form 5-methylcytosine"
aaatttcaggaccctctaaatttggcctctaagcaagccaaacttctcttaataatgacacgttactggggagaacataagaaaataattttggttagattggacccaataaagaatatctg

SEQ ID NO: 2944 - DNA, 122 bp, Homo sapiens
  misc_feature (61)..(62): /note="This region represents a CpG dinucleotide"
  misc_feature (61)..(61): /note="Nucleotide may be methylated to form 5-methylcytosine"
aggcacttggaaatgaggcttacaacatcatgagaaagacggagagagtcagttatctgacgacatctttcagctactgatggtgccactccttccagttaggtaagataatacatttcctt

SEQ ID NO: 2945 - DNA, 122 bp, Homo sapiens
  misc_feature (61)..(62): /note="This region represents a CpG dinucleotide"
  misc_feature (61)..(61): /note="Nucleotide may be methylated to form 5-methylcytosine"
gttggactttgtccagtgcttttcctatgtcaactgagatgatcaggtttctcttttccccgctttattctgttaatatggtgactttttttcaactgattgatttttgtatgttgaaccag

SEQ ID NO: 2946 - DNA, 122 bp, Homo sapiens
  misc_feature (61)..(62): /note="This region represents a CpG dinucleotide"
  misc_feature (61)..(61): /note="Nucleotide may be methylated to form 5-methylcytosine"
aacatctggaggtgtgaggccagataaatggtataagcaagaggcattctttttcaaatgcgtcataagaaagttatgacaggaatattccagctgcagcagagaactggagtcttcccaag

SEQ ID NO: 2947 - DNA, 122 bp, Homo sapiens
  misc_feature (61)..(62): /note="This region represents a CpG dinucleotide"
  misc_feature (61)..(61): /note="Nucleotide may be methylated to form 5-methylcytosine"
aattataaccacaataagacatccctacacatctatcagaatggctaaaattaaaaatagcgacaccatcaaatgctgctcaggatgcagagaaactggattactcaaacatcactgataga

SEQ ID NO: 2948 - DNA, 122 bp, Homo sapiens
  misc_feature (61)..(62): /note="This region represents a CpG dinucleotide"
  misc_feature (61)..(61): /note="Nucleotide may be methylated to form 5-methylcytosine"
tcccggcgcaaagacggtgccaccaggcacggccaccggatccccgctcccgctggctcgcgcctcgggggaagctcagactcctaaactcgcactctccgtgctttgcgccgggacccctg

SEQ ID NO: 2949 - DNA, 122 bp, Homo sapiens
  misc_feature (61)..(62): /note="This region represents a CpG dinucleotide"
  misc_feature (61)..(61): /note="Nucleotide may be methylated to form 5-methylcytosine"
gtaattcatgagtccccacaatgccactactgagaggcattcagaagggggggcaagacacggggtgttcctgctccgtggcctccatcccagccgatcccgctttgcagttgtgcacaatc

SEQ ID NO: 2950 - DNA, 122 bp, Homo sapiens
  misc_feature (61)..(62): /note="This region represents a CpG dinucleotide"
  misc_feature (61)..(61): /note="Nucleotide may be methylated to form 5-methylcytosine"
cgggggaagcagggccgcagaaggcccaatcggagccttctgacacccgccccggcccgccgccctcccggagcttccgtccccgccgcctggctccttactgacacgcgcgccgcccccgg

SEQ ID NO: 2951 - DNA, 122 bp, Homo sapiens
  misc_feature (61)..(62): /note="This region represents a CpG dinucleotide"
  misc_feature (61)..(61): /note="Nucleotide may be methylated to form 5-methylcytosine"
ggagtttgaggccatagcggcatacctattactgtatttcactgaatcaggctgtgtttccgtcgaaggcaaagttcagtgcccacttcccttttcttcttcaatacaaaggttgcctctct

SEQ ID NO: 2952 - DNA, 122 bp, Homo sapiens
  misc_feature (61)..(62): /note="This region represents a CpG dinucleotide"
  misc_feature (61)..(61): /note="Nucleotide may be methylated to form 5-methylcytosine"
cttgtgaagcagtattaacatccattacccctccagcagcaatgccttcctcggccgtggcggtgggttacaagtgaagctgaatcttgaaggtacccaagcctccgcctccgcgcaactcg

SEQ ID NO: 2953 - DNA, 122 bp, Homo sapiens
  misc_feature (61)..(62): /note="This region represents a CpG dinucleotide"
  misc_feature (61)..(61): /note="Nucleotide may be methylated to form 5-methylcytosine"
agcagctaggcgctgggatcggggtcggctctcggctcggctcgcgggctgtaaggtctccgcggaccccaccgcctcttctgcgcgctaagggtgagcgccaagcaatttcgcgagcaata

SEQ ID NO: 2954 - DNA, 122 bp, Homo sapiens
  misc_feature (61)..(62): /note="This region represents a CpG dinucleotide"
  misc_feature (61)..(61): /note="Nucleotide may be methylated to form 5-methylcytosine"
ataaatttctcttctttataaatcacccagtcttaggtattctattgttgcagcacaaaacgtagtaagatagggcagatgcaagaaactgacaatcccctcgtcctttgtaagtagcacca

SEQ ID NO: 2955 - DNA, 122 bp, Homo sapiens
  misc_feature (61)..(62): /note="This region represents a CpG dinucleotide"
  misc_feature (61)..(61): /note="Nucleotide may be methylated to form 5-methylcytosine"
ctgatgcagcatcaaagccagtaaaagcacatttgaaaatgaaaggtctatcacattccacgcttcttttgaaacatcaaaaaggcacaaaaagaagcggtaggactagaaaaagcggacaa

SEQ ID NO: 2956 - DNA, 122 bp, Homo sapiens
  misc_feature (61)..(62): /note="This region represents a CpG dinucleotide"
  misc_feature (61)..(61): /note="Nucleotide may be methylated to form 5-methylcytosine"
agactctgaaatccagtaatattcgtgatgtgtttgttcactccgttgactgccaggtcccggtaggagcaatggccaacagagaagaatcgaggtaaatcctcctttgttgcctaagagct

SEQ ID NO: 2957 - DNA, 122 bp, Homo sapiens
  misc_feature (61)..(62): /note="This region represents a CpG dinucleotide"
  misc_feature (61)..(61): /note="Nucleotide may be methylated to form 5-methylcytosine"
ctcggcacccagcaaggtaggcactctttgcgtctggttttagcggtggggacgcctgggcgtggagagggggtgcggcgtgtcgggtctcatagcttagcggccgagcagaggtttggccc

SEQ ID NO: 2958 - DNA, 122 bp, Homo sapiens
  misc_feature (61)..(62): /note="This region represents a CpG dinucleotide"
  misc_feature (61)..(61): /note="Nucleotide may be methylated to form 5-methylcytosine"
gtcagcttccggagtgaccagagcagggctgttgtcatctcactggcaccttggttccatcgtaggatcagctgggttgcatggtctaggtcctgttggctggtccacttgtcctgggctgc

SEQ ID NO: 2959 - DNA, 122 bp, Homo sapiens
  misc_feature (61)..(62): /note="This region represents a CpG dinucleotide"
  misc_feature (61)..(61): /note="Nucleotide may be methylated to form 5-methylcytosine"
acctctcccttggggctcagtcaagggaatgaaaaaacgaggctagacacctgtccccaacggaaaaaccaagaacacacctggagagcagctcagacaaagggagccaggcggggaaaaca

SEQ ID NO: 2960 - DNA, 122 bp, Homo sapiens
  misc_feature (61)..(62): /note="This region represents a CpG dinucleotide"
  misc_feature (61)..(61): /note="Nucleotide may be methylated to form 5-methylcytosine"
gcattattcacaatagccaagatattgaagaaactataagaatgcagcattattcacaatcgccaaggtatgtccatcaatggtaaaacagataaagaaaataagctacgtgtgtatacaca

SEQ ID NO: 2961 - DNA, 122 bp, Homo sapiens
  misc_feature (61)..(62): /note="This region represents a CpG dinucleotide"
  misc_feature (61)..(61): /note="Nucleotide may be methylated to form 5-methylcytosine"
tccatagaggggctggattcagcagtaaatcatctagtgctggctgactggagcactcggcgcaggcttgcagattctaacttcttggctcctgcagcccatcctcggtagcttcatcttcc

SEQ ID NO: 2962 - DNA, 122 bp, Homo sapiens
  misc_feature (61)..(62): /note="This region represents a CpG dinucleotide"
  misc_feature (61)..(61): /note="Nucleotide may be methylated to form 5-methylcytosine"
tccagaggtggtgcagaaacgaccccgcgccggcgccccatcctgcggccagtgcctccgcgccccggctccggtccccaccgtccccgccccagatttccggaggagcaggcgggcggggt

SEQ ID NO: 2963 - DNA, 122 bp, Homo sapiens
  misc_feature (61)..(62): /note="This region represents a CpG dinucleotide"
  misc_feature (61)..(61): /note="Nucleotide may be methylated to form 5-methylcytosine"
ggctgagcagagataattgagatggaacacacctggtagtaacagatgcccaataagcaccgggtgactctgaatctataaagggatccctcttattttacagccttccacctggatgacac

SEQ ID NO: 2964 - DNA, 122 bp, Homo sapiens
  misc_feature (61)..(62): /note="This region represents a CpG dinucleotide"
  misc_feature (61)..(61): /note="Nucleotide may be methylated to form 5-methylcytosine"
atcacctggagggcttataaaaccgtagataacttgagctccaccccacttggattagtccgttttcacactgctataaagaaatacctgagacttggtaatttataaaggaaagaggttta

SEQ ID NO: 2965 - DNA, 122 bp, Homo sapiens
  misc_feature (61)..(62): /note="This region represents a CpG dinucleotide"
  misc_feature (61)..(61): /note="Nucleotide may be methylated to form 5-methylcytosine"
tagttgagacgcacagagttctgggccatctcggcctcagggtggcggctagtgaggtggcgcagagcgcagacggcaggctccgtgatgtcgtccttgtcaccagcacgcaggatggcatg

SEQ ID NO: 2966 - DNA, 122 bp, Homo sapiens
  misc_feature (61)..(62): /note="This region represents a CpG dinucleotide"
  misc_feature (61)..(61): /note="Nucleotide may be methylated to form 5-methylcytosine"
aaactcaaagctgatactgtgtgtgtatgttgtcgttccagtgcctcatggcgtgggagtcgattattccactactgcaggagaaacaagaggccaagtaaagttctttcttgggacggaga

SEQ ID NO: 2967 - DNA, 122 bp, Homo sapiens
  misc_feature (61)..(62): /note="This region represents a CpG dinucleotide"
  misc_feature (61)..(61): /note="Nucleotide may be methylated to form 5-methylcytosine"
aaccacgctcgcgcagcctgtcccgcagccatcgctcctcccacagctcctggctgcccacggcgcttccctgtagcaaacccagctgctgacgtcataaaaggcacacagccggacctgtc

SEQ ID NO: 2968 - DNA, 122 bp, Homo sapiens
  misc_feature (61)..(62): /note="This region represents a CpG dinucleotide"
  misc_feature (61)..(61): /note="Nucleotide may be methylated to form 5-methylcytosine"
gggaccgaaaggttgaggggagagatgaggattgcctcacacagtgacccaggtgtcacgcggaccagacacgggctctgatggggaagttcttgctatttcaaaatgactttaaaattgca

SEQ ID NO: 2969 - DNA, 122 bp, Homo sapiens
  misc_feature (61)..(62): /note="This region represents a CpG dinucleotide"
  misc_feature (61)..(61): /note="Nucleotide may be methylated to form 5-methylcytosine"
aagcttctctctcgagctacgtggtgctcttggcagaccttgactaggttctttttacagcgtctcatcttcacccaggaaggagcaaacaagacagcttctgcgtagatgtgtgcgggcat

SEQ ID NO: 2970 - DNA, 122 bp, Homo sapiens
  misc_feature (61)..(62): /note="This region represents a CpG dinucleotide"
  misc_feature (61)..(61): /note="Nucleotide may be methylated to form 5-methylcytosine"
ctccgggcggccgccgcctcctccctctcagcgtccagagcccgctcctcctcccgccgccgccgccctcgccccgcgccgcctgccacttatcacaattacccgacgctcccgtgccattt

SEQ ID NO: 2971 - DNA, 122 bp, Homo sapiens
  misc_feature (61)..(62): /note="This region represents a CpG dinucleotide"
  misc_feature (61)..(61): /note="Nucleotide may be methylated to form 5-methylcytosine"
tgcccctgatttttatacccagcatgatcccgtctactcagttttctgaagtttgagaaccgctgagctgagctaaaaggaaagtttttatgcagacagacgtccaagcatccaatctattt

SEQ ID NO: 2972 - DNA, 122 bp, Homo sapiens
  misc_feature (61)..(62): /note="This region represents a CpG dinucleotide"
  misc_feature (61)..(61): /note="Nucleotide may be methylated to form 5-methylcytosine"
gctgagggagaggaggccaaagagagcgagcagtgagcgccggggcggacgagaagccagcgctcccagcctcctcggttatccgctccggtttccgctcacgttcaacaggggccgacagg

SEQ ID NO: 2973 - DNA, 122 bp, Homo sapiens
  misc_feature (61)..(62): /note="This region represents a CpG dinucleotide"
  misc_feature (61)..(61): /note="Nucleotide may be methylated to form 5-methylcytosine"
taataaaagttctcaataagagcttggaaggccattacattaatgatttgctggcctttgcgggatcccaattaaatgcaacccaagttgaggctggtagcctaagggtacgtctccctagg

SEQ ID NO: 2974 - DNA, 122 bp, Homo sapiens
  misc_feature (61)..(62): /note="This region represents a CpG dinucleotide"
  misc_feature (61)..(61): /note="Nucleotide may be methylated to form 5-methylcytosine"
tataccgagctgttcacattctgcctggctccctataagactggtagtatacatggtgttcgttcattcattcattcattcaccaaacactgactggacatatactgtgtgttaggccttga

SEQ ID NO: 2975 - DNA, 122 bp, Homo sapiens
  misc_feature (61)..(62): /note="This region represents a CpG dinucleotide"
  misc_feature (61)..(61): /note="Nucleotide may be methylated to form 5-methylcytosine"
tgattctgtacttttgagtgcctctgcatggaagtgaaagaacttactcagcagaggcagcgtagcatagagagaagcttgtcagacatcttctgtcacaaacttgctatgtaagcttgggt

SEQ ID NO: 2976 - DNA, 122 bp, Homo sapiens
  misc_feature (61)..(62): /note="This region represents a CpG dinucleotide"
  misc_feature (61)..(61): /note="Nucleotide may be methylated to form 5-methylcytosine"
ggtcccgtgtctataaaactttggaaaatgcacacccatgtttagtgacagaaagcagctcgggggtttcctggggactggaagaagccctggaaggacagcaggactggggggcttgggcc

SEQ ID NO: 2977 - DNA, 122 bp, Homo sapiens
  misc_feature (61)..(62): /note="This region represents a CpG dinucleotide"
  misc_feature (61)..(61): /note="Nucleotide may be methylated to form 5-methylcytosine"
gtatggagcacttgtgtgggggagtctttcatacctgtcaggtttcacatctctgctttgcgtgaaaagctcatcatccacagcagtcagggatgtgcctttacttgctggggctgatctgt

SEQ ID NO: 2978 - DNA, 122 bp, Homo sapiens
  misc_feature (61)..(62): /note="This region represents a CpG dinucleotide"
  misc_feature (61)..(61): /note="Nucleotide may be methylated to form 5-methylcytosine"
tcccctctttccgttctaaagtttcatttcaaaagtattaggaaatcttactttaagcagcgagctgatggcgttctccagaactcggtttgagcaacaaacttgagacaacctttgtctgg

SEQ ID NO: 2979 - DNA, 122 bp, Homo sapiens
  misc_feature (61)..(62): /note="This region represents a CpG dinucleotide"
  misc_feature (61)..(61): /note="Nucleotide may be methylated to form 5-methylcytosine"
gtcaaggttacaaaaggatcttatagtcttatctgcttcctgtctgtgctttgtaaaatccgctaccaccactacccccaacccagctcgtgaactctgataatggcctaatattggccttt

SEQ ID NO: 2980 - DNA, 122 bp, Homo sapiens
  misc_feature (61)..(62): /note="This region represents a CpG dinucleotide"
  misc_feature (61)..(61): /note="Nucleotide may be methylated to form 5-methylcytosine"
ttcatctagtattttcctccctttttcaccagtgcatctgttgtcaaagattattaaactcgcacagggattcttgattttccagatgaaaagtttatagaatcccggctttttctaattcc

SEQ ID NO: 2981 - DNA, 122 bp, Homo sapiens
  misc_feature (61)..(62): /note="This region represents a CpG dinucleotide"
  misc_feature (61)..(61): /note="Nucleotide may be methylated to form 5-methylcytosine"
cagccactggcaaccacaaatctgatttctgtccttacagttttgccttttccaaaatgccgtttggcaggatttatataagggaactttttgagtctggcttcttttacttagcataatgc

SEQ ID NO: 2982 - DNA, 122 bp, Homo sapiens
  misc_feature (61)..(62): /note="This region represents a CpG dinucleotide"
  misc_feature (61)..(61): /note="Nucleotide may be methylated to form 5-methylcytosine"
aatgtacgtgaagtatttctgaaatatgcagaacatcaatatcatgagcagaaaaagaggcgtggaagtctccaagtgtagatggatccacattaaataacagaggccagaggtgagtcgcc

SEQ ID NO: 2983 - DNA, 122 bp, Homo sapiens
  misc_feature (61)..(62): /note="This region represents a CpG dinucleotide"
  misc_feature (61)..(61): /note="Nucleotide may be methylated to form 5-methylcytosine"
gcactcctcagcccttgggcggttgatgggaccaggtgctgtggagcagggggcggtgctcgtcggggacgctggggccgcgcaggagccgacggcggccgggggaagctcaggcatggcgg

SEQ ID NO: 2984 - DNA, 122 bp, Homo sapiens
  misc_feature (61)..(62): /note="This region represents a CpG dinucleotide"
  misc_feature (61)..(61): /note="Nucleotide may be methylated to form 5-methylcytosine"
ccccgcaccgcctgattccgaggggcgggagcgcattgggctgcgcacgggtgggggcgccgcgccagcttcgcgtagctgctctgacgccgctgccgccgccgccgccgccgccgccctcc

SEQ ID NO: 2985 - DNA, 122 bp, Homo sapiens
  misc_feature (61)..(62): /note="This region represents a CpG dinucleotide"
  misc_feature (61)..(61): /note="Nucleotide may be methylated to form 5-methylcytosine"
ctaactccaaccctctccaattctctacagctatctgctctgtgtcttcccccaagaaagcgatggaaaccagagcaggaggtttccgtaaccagtcattataatttgtcagggagccatac

SEQ ID NO: 2986 - DNA, 122 bp, Homo sapiens
  misc_feature (61)..(62): /note="This region represents a CpG dinucleotide"
  misc_feature (61)..(61): /note="Nucleotide may be methylated to form 5-methylcytosine"
gggggaggaaattggcttcagaccagggaaatgctgcagatggggactccacagaagtcccgaactgaggccagagagcaaggagttcaaggatgattttccagtggaagaggaggcacaat

SEQ ID NO: 2987 - DNA, 122 bp, Homo sapiens
  misc_feature (61)..(62): /note="This region represents a CpG dinucleotide"
  misc_feature (61)..(61): /note="Nucleotide may be methylated to form 5-methylcytosine"
cagatctaggaaatctaatgaaagaattatccctgctacaccgtgtttttaacataggaacggacagttaacttgtgtgtttgttcaagaatgattcataatgcagaagatgaactggtgaa

SEQ ID NO: 2988 - DNA, 122 bp, Homo sapiens
  misc_feature (61)..(62): /note="This region represents a CpG dinucleotide"
  misc_feature (61)..(61): /note="Nucleotide may be methylated to form 5-methylcytosine"
agatggaatgaatttccaatttcctaaggaagttagacctttctccatttctaatatatgcgtttaatgctacaaatttccctctaagcactgcttttgctgtgtcctgtgaattttgataa

SEQ ID NO: 2989 - DNA, 122 bp, Homo sapiens
  misc_feature (61)..(62): /note="This region represents a CpG dinucleotide"
  misc_feature (61)..(61): /note="Nucleotide may be methylated to form 5-methylcytosine"
aatatcctagattgactttaatgagtagcctgaaatagctacaggctccagggggtagaccgaacctattgagggcctctcctaggagataaaaaggcgcttacatagcttgcctcataaag

SEQ ID NO: 2990 - DNA, 122 bp, Homo sapiens
  misc_feature (61)..(62): /note="This region represents a CpG dinucleotide"
  misc_feature (61)..(61): /note="Nucleotide may be methylated to form 5-methylcytosine"
tgtaaagcacccaggagagctggctgcggccctgatagctatcaggacagtttctttgttcgtggcctcaaggtgcagggagtggaagatactccgccctggctcatgctggttgctcagcc

SEQ ID NO: 2991 - DNA, 122 bp, Homo sapiens
  misc_feature (61)..(62): /note="This region represents a CpG dinucleotide"
  misc_feature (61)..(61): /note="Nucleotide may be methylated to form 5-methylcytosine"
attttcctaagttgttctttgttaggcgctgtaatggagtggaatgagacctggatatggcgtcagagagactggggctcaagaactgtgctctgacatttattagctgtgggcaaataact

SEQ ID NO: 2992 - DNA, 122 bp, Homo sapiens
  misc_feature (61)..(62): /note="This region represents a CpG dinucleotide"
  misc_feature (61)..(61): /note="Nucleotide may be methylated to form 5-methylcytosine"
aaagtgaggtcaagagtattatttttaaataagtggaagaacagcttaactgtatgctgacgggactaatccaataaagacagaaaacttgatgatcccagagagagggaagagaattgctg

SEQ ID NO: 2993 - DNA, 122 bp, Homo sapiens
  misc_feature (61)..(62): /note="This region represents a CpG dinucleotide"
  misc_feature (61)..(61): /note="Nucleotide may be methylated to form 5-methylcytosine"
tagtttttgggttgaaaatagtgggccagtgtttggttgggggcagtgaggctgtgatggcgggggaccatgccaagctcctaccagcctgggacgctaaaccagcacttccccatttcctg

SEQ ID NO: 2994 - DNA, 122 bp, Homo sapiens
  misc_feature (61)..(62): /note="This region represents a CpG dinucleotide"
  misc_feature (61)..(61): /note="Nucleotide may be methylated to form 5-methylcytosine"
gaggactcaggccagactggtgggttggaatcctagctgtgcagccgagcagcttgagcacgttactcaacctccacccaatgtacgaaaagcacatagtccagttccaaggacatgataaa

SEQ ID NO: 2995 - DNA, 122 bp, Homo sapiens
  misc_feature (61)..(62): /note="This region represents a CpG dinucleotide"
  misc_feature (61)..(61): /note="Nucleotide may be methylated to form 5-methylcytosine"
tttgacccaattcccattcgatggaaaagaagaacagagaggcaaggacgtgggcttcagcgtcacggaggcctgagtttaaacccttggatctatgacaacccactagccgtgaggttcaa

SEQ ID NO: 2996 - DNA, 122 bp, Homo sapiens
  misc_feature (61)..(62): /note="This region represents a CpG dinucleotide"
  misc_feature (61)..(61): /note="Nucleotide may be methylated to form 5-methylcytosine"
tatatttaaagcatgaaatggcatgagatccagcccagacttctctcccaatcatttatccggctgtctacttgacatcactacttggatgtctaaaagacaactcaagctcaaaacatcca

SEQ ID NO: 2997 - DNA, 122 bp, Homo sapiens
  misc_feature (61)..(62): /note="This region represents a CpG dinucleotide"
  misc_feature (61)..(61): /note="Nucleotide may be methylated to form 5-methylcytosine"
ctgtctgttacgttcatccataatcctcgtaatctgaatcttttttctccccatagtccccgtttttcttctctctctcgtccctgaaattatgtattttttccttccttttctttctcttt

SEQ ID NO: 2998 - DNA, 122 bp, Homo sapiens
  misc_feature (61)..(62): /note="This region represents a CpG dinucleotide"
  misc_feature (61)..(61): /note="Nucleotide may be methylated to form 5-methylcytosine"
aagtatacccatcgatggccctatctacaaattatactaaacaccacacaatgaactgtgcgtgcttgtacaatccactttcctaaaggatggagaatgattagaggtgattaaggctcagg

SEQ ID NO: 2999 - DNA, 122 bp, Homo sapiens
  misc_feature (61)..(62): /note="This region represents a CpG dinucleotide"
  misc_feature (61)..(61): /note="Nucleotide may be methylated to form 5-methylcytosine"
gccatcacataaacccctcagaatgcagccaaagcgagactttgctagtttcccattccacgcagatgccccagggctcagcagacagtttgaaaccctcgtcctaactgtggcaaacagct

SEQ ID NO: 3000 - DNA, 122 bp, Homo sapiens
  misc_feature (61)..(62): /note="This region represents a CpG dinucleotide"
  misc_feature (61)..(61): /note="Nucleotide may be methylated to form 5-methylcytosine"
ggattatagtgtgagccgccacgcccggccgctgggattgcaggcctgagctcccgtgcccggccatcgttgatgtttttatgaatcacttttagattttgtagattaacctcttccatcat

SEQ ID NO: 3001 - DNA, 122 bp, Homo sapiens
  misc_feature (61)..(62): /note="This region represents a CpG dinucleotide"
  misc_feature (61)..(61): /note="Nucleotide may be methylated to form 5-methylcytosine"
tttgagaatttctttctttttaaaattttatttttctatttcttggagtccagacacagccgaaaagctgacgcttgggagattctcttttcaccaatataactgacatcacagagttcgtg

SEQ ID NO: 3002 - DNA, 122 bp, Homo sapiens
  misc_feature (61)..(62): /note="This region represents a CpG dinucleotide"
  misc_feature (61)..(61): /note="Nucleotide may be methylated to form 5-methylcytosine"
gaaaaaggtctttttactttgcagcaaaatgccatcactcgatttccgtaaagatgcatacgttatagaaattcaaacaacaatatgaatttaaactcaccttaaatgttaccagccagaaa

SEQ ID NO: 3003 - DNA, 122 bp, Homo sapiens
  misc_feature (61)..(62): /note="This region represents a CpG dinucleotide"
  misc_feature (61)..(61): /note="Nucleotide may be methylated to form 5-methylcytosine"
agctgggactacaggtgcttgccactgttcctggctaaactttttattgtcttcttaaaccgtaaattccatgaggagcgagcatatgacttgaatatctttattccccaattggatttaac

SEQ ID NO: 3004 - DNA, 122 bp, Homo sapiens
  misc_feature (61)..(62): /note="This region represents a CpG dinucleotide"
  misc_feature (61)..(61): /note="Nucleotide may be methylated to form 5-methylcytosine"
gagctgtgaactgccaaaatgaggcacgcctagcaacataacctggccgaccctaggccgcgagctctctgtacacagcctgtcactaggtgcaatgcaggatgtggccaccagccctttgc

SEQ ID NO: 3005 - DNA, 122 bp, Homo sapiens
  misc_feature (61)..(62): /note="This region represents a CpG dinucleotide"
  misc_feature (61)..(61): /note="Nucleotide may be methylated to form 5-methylcytosine"
cattcacatttcatcgtgtagctgagaaaatagtatagccgaggcttagagaaattagtgcggggacaaggttggcaaaagtctttcaggacaccaaaactcaatgcagctttccttcctgt

SEQ ID NO: 3006 - DNA, 122 bp, Homo sapiens
  misc_feature (61)..(62): /note="This region represents a CpG dinucleotide"
  misc_feature (61)..(61): /note="Nucleotide may be methylated to form 5-methylcytosine"
aatttctagccacttcttgttgctgttttggtgagctttactgttgcaggtatctgcttacgacaacgtgtgatgtgaatcatctcagcatgagcagttcaactctccagtaaattgtatat

SEQ ID NO: 3007 - DNA, 122 bp, Homo sapiens
  misc_feature (61)..(62): /note="This region represents a CpG dinucleotide"
  misc_feature (61)..(61): /note="Nucleotide may be methylated to form 5-methylcytosine"
tcatccaagcgatggttcggggaaatggaaatagatctggtcagatcggtgcaggccaagcgggtgcctaacatgtgtttaccgacaacgacctagtacacgtttattaggaacattttcta

SEQ ID NO: 3008 - DNA, 122 bp, Homo sapiens
  misc_feature (61)..(62): /note="This region represents a CpG dinucleotide"
  misc_feature (61)..(61): /note="Nucleotide may be methylated to form 5-methylcytosine"
cactcttgtcctggggctggaatttggttgtattgatcaatgctggaattaatgggtcaacgggagggacctgactcagtaatactagccatatagagtttgccttgtcttattctgaggat

SEQ ID NO: 3009 - DNA, 122 bp, Homo sapiens
  misc_feature (61)..(62): /note="This region represents a CpG dinucleotide"
  misc_feature (61)..(61): /note="Nucleotide may be methylated to form 5-methylcytosine"
ctggacaagaactgcctggcaactaaaatccacaaggatctactgaaagctacaatttggcgctatggggtcataaaaaggctttagacacttagtatcctggttgcctggaggagtttacc

SEQ ID NO: 3010 - DNA, 122 bp, Homo sapiens
  misc_feature (61)..(62): /note="This region represents a CpG dinucleotide"
  misc_feature (61)..(61): /note="Nucleotide may be methylated to form 5-methylcytosine"
ttggcagcctccctgcttctgccagccggggggtgaggaaggagtgaactcagatccaaacgaggactcccaaaatggcagagaggacactcagcccatagaccccctggccagactgggtg

SEQ ID NO: 3011 - DNA, 122 bp, Homo sapiens
  misc_feature (61)..(62): /note="This region represents a CpG dinucleotide"
  misc_feature (61)..(61): /note="Nucleotide may be methylated to form 5-methylcytosine"
ttacaactacctacctaagcaaaagatgttctgtgttcctttgttgctgatttagctgcccgaaatcaccatcttaagatgcccaaaatcacatcttaagaagtgttatgggcacatgaatt

SEQ ID NO: 3012 - DNA, 122 bp, Homo sapiens
  misc_feature (61)..(62): /note="This region represents a CpG dinucleotide"
  misc_feature (61)..(61): /note="Nucleotide may be methylated to form 5-methylcytosine"
ttctaatattctgagtactcagcaatcagtatcaatcaacttataactgatcttctgttccgactgtaacggctatcctttgcaatactttctcttccctgctggattagaaaattggctga

SEQ ID NO: 3013 - DNA, 122 bp, Homo sapiens
  misc_feature (61)..(62): /note="This region represents a CpG dinucleotide"
  misc_feature (61)..(61): /note="Nucleotide may be methylated to form 5-methylcytosine"
tgctcaggctcgggtttcctcatctgtgaaacgggaacggatgtggcttcttaaccattacgctgtgtccgtcacagtcattctcacttctcgagtacccagttggtgggagttccagtatg

SEQ ID NO: 3014 - DNA, 122 bp, Homo sapiens
  misc_feature (61)..(62): /note="This region represents a CpG dinucleotide"
  misc_feature (61)..(61): /note="Nucleotide may be methylated to form 5-methylcytosine"
tccgctggccgaggggctgcgagggccgggcggcgaagatgcgtggggcgcggaaggggccgagcccctctttggactgcaagtcccgtctccctggcaacggcctcggccttgggggcggg

SEQ ID NO: 3015 - DNA, 122 bp, Homo sapiens
  misc_feature (61)..(62): /note="This region represents a CpG dinucleotide"
  misc_feature (61)..(61): /note="Nucleotide may be methylated to form 5-methylcytosine"
agaaactggctctgcaggtgctgaccttgcaggttcagatctgagagaggatttactcttcgcttagttgtgaggcccaagcgcagccccctcccctccccgggctgtgctttgtctcctgg

SEQ ID NO: 3016 - DNA, 122 bp, Homo sapiens
  misc_feature (61)..(62): /note="This region represents a CpG dinucleotide"
  misc_feature (61)..(61): /note="Nucleotide may be methylated to form 5-methylcytosine"
cctaattcaatggcatatcctgggagccactcaaaatagagatgatgctagttatgatcacggtcatacgttatattttataaagccctttgtcatgaattcctcccattccttttcacgtg

SEQ ID NO: 3017 - DNA, 122 bp, Homo sapiens
  misc_feature (61)..(62): /note="This region represents a CpG dinucleotide"
  misc_feature (61)..(61): /note="Nucleotide may be methylated to form 5-methylcytosine"
aacaaagggacaggctctggcttgttatccgcagctggaacatgtccttaaggcatagatcgctcatgctattgtttgtggtttaggtacgccttgagcggttttctgccctgggtgggcca

SEQ ID NO: 3018 - DNA, 122 bp, Homo sapiens
  misc_feature (61)..(62): /note="This region represents a CpG dinucleotide"
  misc_feature (61)..(61): /note="Nucleotide may be methylated to form 5-methylcytosine"
gatttgtgaattcctattttgttcaaatgatcattgtgcctattgtgtcagccagtgccacgtcatgtagctttatgatacattttagtaattctcagtgcacaagctccctcatttttctt

SEQ ID NO: 3019 - DNA, 122 bp, Homo sapiens
  misc_feature (61)..(62): /note="This region represents a CpG dinucleotide"
  misc_feature (61)..(61): /note="Nucleotide may be methylated to form 5-methylcytosine"
gctgcccaggaggcacactgatctcacacttaatttctccagttttattatttgctctggcggcattttctcttgttagagaaatctgggagcttgaggccaggccctcataattactacaa

SEQ ID NO: 3020 - DNA, 122 bp, Homo sapiens
  misc_feature (61)..(62): /note="This region represents a CpG dinucleotide"
  misc_feature (61)..(61): /note="Nucleotide may be methylated to form 5-methylcytosine"
ggttgtcgtgtttacagtttttttccacatcacgagttcaggacatgataacataataaacgaggttttctacaaagccaaggatctgaatgacaaaggaaggacaactagagattagggat

SEQ ID NO: 3021 - DNA, 122 bp, Homo sapiens
  misc_feature (61)..(62): /note="This region represents a CpG dinucleotide"
  misc_feature (61)..(61): /note="Nucleotide may be methylated to form 5-methylcytosine"
gataatactactggctaccaaccatccttttcttggggttgggctactgtccaatgagcacgtagtgagggcagtgctgctaacacctacacaaaattcctgcatcagctacagctttactt

SEQ ID NO: 3022 - DNA, 122 bp, Homo sapiens
  misc_feature (61)..(62): /note="This region represents a CpG dinucleotide"
  misc_feature (61)..(61): /note="Nucleotide may be methylated to form 5-methylcytosine"
caagtatcaatcaaaactacatgccaacgtccactccttggaaataattaaatgacatgacgtgcctgattttttcagctggtgatgcactgtaatttgcatctgctgaaggaatttatctt

SEQ ID NO: 3023 - DNA, 122 bp, Homo sapiens
  misc_feature (61)..(62): /note="This region represents a CpG dinucleotide"
  misc_feature (61)..(61): /note="Nucleotide may be methylated to form 5-methylcytosine"
tccatccatcaccaggtcgtcccctcctcctcttcctctccccttccttcctcgctgcctcgccgcctccccgccgcccttacctgtagccatctgattgtaatggactaccgagtcgctgc

SEQ ID NO: 3024 - DNA, 122 bp, Homo sapiens
  misc_feature (61)..(62): /note="This region represents a CpG dinucleotide"
  misc_feature (61)..(61): /note="Nucleotide may be methylated to form 5-methylcytosine"
ggtcttgcaagtgggacaacagtgtgttctgccagtttgtgtcatcctgccacacctgcacgtcaggcatggagacgtgtccacaaggagcccgtgtctggtgctgagtctcctccaggacg

SEQ ID NO: 3025 - DNA, 122 bp, Homo sapiens
  misc_feature (61)..(62): /note="This region represents a CpG dinucleotide"
  misc_feature (61)..(61): /note="Nucleotide may be methylated to form 5-methylcytosine"
acaagtgtgagccactgtgcctagcctggaaagtcttaacccataggaacttactgatcacgaatgaattcattaagattaccatatggcgaatataagagttaatacctgagacttcactt

SEQ ID NO: 3026 - DNA, 122 bp, Homo sapiens
  misc_feature (61)..(62): /note="This region represents a CpG dinucleotide"
  misc_feature (61)..(61): /note="Nucleotide may be methylated to form 5-methylcytosine"
tcctgtcagatcagcggtggcattagagtctcataggagcatgaaccctattgtgaactacgcatgcgaggatctagtttgtgcactcctactgagaatctaatgcctgatgatataaggtg

SEQ ID NO: 3027 - DNA, 122 bp, Homo sapiens
  misc_feature (61)..(62): /note="This region represents a CpG dinucleotide"
  misc_feature (61)..(61): /note="Nucleotide may be methylated to form 5-methylcytosine"
ccagtcctgttactgcttgaggataaagttcagtctttaaaggacaaagaagcttcttgccgggagttggccagacagctcaggacacagctctgcagcccattctgattgtccaatgtttc

SEQ ID NO: 3028 - DNA, 122 bp, Homo sapiens
  misc_feature (61)..(62): /note="This region represents a CpG dinucleotide"
  misc_feature (61)..(61): /note="Nucleotide may be methylated to form 5-methylcytosine"
ctcggcctcccctgccccttggttctcggcaatgagctgtgacctgagaccctccagctccgcgctcttcactctggccccgcaacctcacatctcttctccttggcaccgagaagaggctg

SEQ ID NO: 3029 - DNA, 122 bp, Homo sapiens
  misc_feature (61)..(62): /note="This region represents a CpG dinucleotide"
  misc_feature (61)..(61): /note="Nucleotide may be methylated to form 5-methylcytosine"
tagtgttagttttgtcttaccattaaggtgtgaactttcaggatctcagttgaatgtgtccggtatttagtgaggcctctgtactctggctggataaaatacaaatgtcttctagctccctg

SEQ ID NO: 3030 - DNA, 122 bp, Homo sapiens
  misc_feature (61)..(62): /note="This region represents a CpG dinucleotide"
  misc_feature (61)..(61): /note="Nucleotide may be methylated to form 5-methylcytosine"
tattgcaatttgttttgcgtgcttggtctgtccctcactagacgatgtactccttcagggcgtgtcttattattccttgttctgtacccgggccttgcacaatattttgcacacaaatgact

SEQ ID NO: 3031 - DNA, 122 bp, Homo sapiens
  misc_feature (61)..(62): /note="This region represents a CpG dinucleotide"
  misc_feature (61)..(61): /note="Nucleotide may be methylated to form 5-methylcytosine"
aaagcccaggtcagccacttactctacaatgagtaatgattcttaactggagcaattttgcgcccctacccaggacatttggcaatgtcttgagatatttttggttgtcatacttgatgggt

SEQ ID NO: 3032 - DNA, 122 bp, Homo sapiens
  misc_feature (61)..(62): /note="This region represents a CpG dinucleotide"
  misc_feature (61)..(61): /note="Nucleotide may be methylated to form 5-methylcytosine"
cttccgtgggtaattagacatggctactctggtcacagcgtttcagctgcttagctatgccgctaacgtcacgtgtcgaagtttttacttcagtaataagaattgtatagtattcaagaagg

SEQ ID NO: 3033 - DNA, 122 bp, Homo sapiens
  misc_feature (61)..(62): /note="This region represents a CpG dinucleotide"
  misc_feature (61)..(61): /note="Nucleotide may be methylated to form 5-methylcytosine"
tacccggtctagccgaactcctctgccttaaccttctgctgcgttcaatacattttccctcgggatacagtcagagaagagctggttagggaatcagtggcaggttaaattgagctggcttt

SEQ ID NO: 3034 - DNA, 122 bp, Homo sapiens
  misc_feature (61)..(62): /note="This region represents a CpG dinucleotide"
  misc_feature (61)..(61): /note="Nucleotide may be methylated to form 5-methylcytosine"
tcctctggagctgagacactcttcttcttctgcccttggacatcagaactcctggctctccggcctttgaacttcaggacttgtaccaggaggccctgggttctcaggcctttggctttgga

SEQ ID NO: 3035 - DNA, 122 bp, Homo sapiens
  misc_feature (61)..(62): /note="This region represents a CpG dinucleotide"
  misc_feature (61)..(61): /note="Nucleotide may be methylated to form 5-methylcytosine"
gaggggcgggtgctgtcctggcactgactcagcttttcacagcgcaaggccgagcccgaacgacgcgctggctttaatggagatctgtcgcagccgttccatcccatctgcacatccactta

SEQ ID NO: 3036 - DNA, 122 bp, Homo sapiens
  misc_feature (61)..(62): /note="This region represents a CpG dinucleotide"
  misc_feature (61)..(61): /note="Nucleotide may be methylated to form 5-methylcytosine"
gagctcagagtcactggaagctccgcctgtgagtgcattggtgactggcttcattcattccgcatcgtgtcatccactatgtggataaacgtgtaagtgctccatccctttttgtgggtgaa

SEQ ID NO: 3037 - DNA, 122 bp, Homo sapiens
  misc_feature (61)..(62): /note="This region represents a CpG dinucleotide"
  misc_feature (61)..(61): /note="Nucleotide may be methylated to form 5-methylcytosine"
tccttgatttctcactccaaataaggtgagccatagagaagaggttggctgatccctcaccggactcaaatggcagttgccattggcctgagaaaggaaaaggcagtgccaagcctaggaaa

SEQ ID NO: 3038 - DNA, 122 bp, Homo sapiens
  misc_feature (61)..(62): /note="This region represents a CpG dinucleotide"
  misc_feature (61)..(61): /note="Nucleotide may be methylated to form 5-methylcytosine"
aaaccaacaatgactctggaatcaaagctggctaaggatttcttgccttaaagcaaggcacgtcattatttcatttgtacagtgaaagaggctggcaatgatctctaaagccctttccaagt

SEQ ID NO: 3039 - DNA, 122 bp, Homo sapiens
  misc_feature (61)..(62): /note="This region represents a CpG dinucleotide"
  misc_feature (61)..(61): /note="Nucleotide may be methylated to form 5-methylcytosine"
gcagtgcatagagcacttctccagctctgtttaaatacaccattgacttgttgcctatgacgccatcaagagtgttcctacagacacagccagacagctaagtcaggcagagcccaaaatag

SEQ ID NO: 3040 - DNA, 122 bp, Homo sapiens
  misc_feature (61)..(62): /note="This region represents a CpG dinucleotide"
  misc_feature (61)..(61): /note="Nucleotide may be methylated to form 5-methylcytosine"
atatccagctgagttgtcaactggcactgagccaggcacgcaaagccttgccatgtgaagcggcatgtggagcatatgccatttgtaaaagaaaatcttgttcatgcatgatttaatggttt

SEQ ID NO: 3041 - DNA, 122 bp, Homo sapiens
  misc_feature (61)..(62): /note="This region represents a CpG dinucleotide"
  misc_feature (61)..(61): /note="Nucleotide may be methylated to form 5-methylcytosine"
ttggtttcgtattttctatcatgtctatgcatacctttatcaaaataaaattgtttaggccggggcagtgacacatctgtaatcccagcattttgggaggttgtgatgggtggatcgcctga

SEQ ID NO: 3042 - DNA, 122 bp, Homo sapiens
  misc_feature (61)..(62): /note="This region represents a CpG dinucleotide"
  misc_feature (61)..(61): /note="Nucleotide may be methylated to form 5-methylcytosine"
cacgtcgtctttgacctgcttttaaagcacattcccgtgtgtcgtgaacaacgctgtccccggcgtctgctcatcaagaggtgcgaggtgcttctgccggtttctcctccgctggggacgca

SEQ ID NO: 3043 - DNA, 122 bp, Homo sapiens
  misc_feature (61)..(62): /note="This region represents a CpG dinucleotide"
  misc_feature (61)..(61): /note="Nucleotide may be methylated to form 5-methylcytosine"
ttttgctgacctcttttccgtttgcattttgccccatattagaatgctaccatctaaaaccgctccatgaattagaaagtttaagttgtcagggactgaatgtgtctgttttccaacagttt

SEQ ID NO: 3044 - DNA, 122 bp, Homo sapiens
  misc_feature (61)..(62): /note="This region represents a CpG dinucleotide"
  misc_feature (61)..(61): /note="Nucleotide may be methylated to form 5-methylcytosine"
attagaatgttgtcaaccttataaaataaaacttcacattaaactggttaaatgataagccgatgagccttgttattttatgtgtcaataagtctcaggtggggcagatccaggactgaata

SEQ ID NO: 3045 - DNA, 122 bp, Homo sapiens
  misc_feature (61)..(62): /note="This region represents a CpG dinucleotide"
  misc_feature (61)..(61): /note="Nucleotide may be methylated to form 5-methylcytosine"
cataatcctcgtaatctgaatcttttttctccccatagtccccgtttttcttctctctctcgtccctgaaattatgtattttttccttccttttctttctctttcctgtttcctccaaacaa

SEQ ID NO: 3046 - DNA, 122 bp, Homo sapiens
  misc_feature (61)..(62): /note="This region represents a CpG dinucleotide"
  misc_feature (61)..(61): /note="Nucleotide may be methylated to form 5-methylcytosine"
gaatgctggcccagaggaatcaaagtctcagagtgaacctcctcttgtctccattttctccgccatctcacacccggcattagaaattacaattcatcaatcagcgtgatgaacattagcat

SEQ ID NO: 3047 - DNA, 122 bp, Homo sapiens
  misc_feature (61)..(62): /note="This region represents a CpG dinucleotide"
  misc_feature (61)..(61): /note="Nucleotide may be methylated to form 5-methylcytosine"
tgcccaaggccaagtagtacacaagtgtggtggccagaactagaatttggacttttccagcggacgtgatagctagctgtgggccatctgtcttaggataaacccaccatcaatgttaattc

SEQ ID NO: 3048 - DNA, 122 bp, Homo sapiens
  misc_feature (61)..(62): /note="This region represents a CpG dinucleotide"
  misc_feature (61)..(61): /note="Nucleotide may be methylated to form 5-methylcytosine"
cctgtattttggaattggacttcttggattcagatcccagcttttgccacttactagctgcgtgactgtgggaaaactaaactctctacccgagttttctcgtctataaaacagagaaaaca

SEQ ID NO: 3049 - DNA, 122 bp, Homo sapiens
  misc_feature (61)..(62): /note="This region represents a CpG dinucleotide"
  misc_feature (61)..(61): /note="Nucleotide may be methylated to form 5-methylcytosine"
ggaaattggagggaaaagttagctagcctcgcactgttagtatgatcagtctttcccagtcgtacagtctataatgggaggcctgtctgaaaatacttgcacttctcatttttatgcccttg

SEQ ID NO: 3050 - DNA, 122 bp, Homo sapiens
  misc_feature (61)..(62): /note="This region represents a CpG dinucleotide"
  misc_feature (61)..(61): /note="Nucleotide may be methylated to form 5-methylcytosine"
aggtgagtgccttctccataggaacctataccaaataacagcgctggaagtgaaagtaagcggactggcatttatgatctgtccttacacagttgtctctgtctgagagaacacagcactgg

SEQ ID NO: 3051 - DNA, 122 bp, Homo sapiens
  misc_feature (61)..(62): /note="This region represents a CpG dinucleotide"
  misc_feature (61)..(61): /note="Nucleotide may be methylated to form 5-methylcytosine"
ctcttggctccaaccctcccttccaggtgggtgatgatttccagccctgatctcaggagccgcagctgcacatttacaatgctcactgatgattctatgccaacaacattttagtagtgcat

SEQ ID NO: 3052 - DNA, 122 bp, Homo sapiens
  misc_feature (61)..(62): /note="This region represents a CpG dinucleotide"
  misc_feature (61)..(61): /note="Nucleotide may be methylated to form 5-methylcytosine"
gaattgtcacaccgtatgtctgagtttgcacgtgctgttttactcatggtgttttcaagacgtatctgtgttgctccacatccgttgggttcattcacttcaaccactgcctgtgctgtatg

SEQ ID NO: 3053 - DNA, 122 bp, Homo sapiens
  misc_feature (61)..(62): /note="This region represents a CpG dinucleotide"
  misc_feature (61)..(61): /note="Nucleotide may be methylated to form 5-methylcytosine"
tgaggctgctgtgagtcatgatggtgccattgcactccccagcctggtaacagagcaagacgtcatctgaaaaaaaaaaaaaaaaaaaaaaaaaaggtccttttatttcagaaggaagatct

SEQ ID NO: 3054 - DNA, 122 bp, Homo sapiens
  misc_feature (61)..(62): /note="This region represents a CpG dinucleotide"
  misc_feature (61)..(61): /note="Nucleotide may be methylated to form 5-methylcytosine"
gctataacgtctgcctggacttgctcttagaaattcactgtttctctgaggcatcttacacggttactgagtcatagcctttccgaggctaaagagtcatcgaagcttccttataatctagc

SEQ ID NO: 3055 - DNA, 122 bp, Homo sapiens
  misc_feature (61)..(62): /note="This region represents a CpG dinucleotide"
  misc_feature (61)..(61): /note="Nucleotide may be methylated to form 5-methylcytosine"
gcccgagcaagtataatgaaagaaacccaaggaatttccacctccagcatcctgggaccacggacaccaacaatttccagagataaaaataagagataacacattccgagaagtcaagtgac

SEQ ID NO: 3056 - DNA, 122 bp, Homo sapiens
  misc_feature (61)..(62): /note="This region represents a CpG dinucleotide"
  misc_feature (61)..(61): /note="Nucleotide may be methylated to form 5-methylcytosine"
ctcggctcactgcagcctccatctccagggctcaagccattctcccgcctcagccacccgcgtagctggaccacaggcgcgcgccaccagatctcagttctctcaacaggactctcattgct

SEQ ID NO: 3057 - DNA, 122 bp, Homo sapiens
  misc_feature (61)..(62): /note="This region represents a CpG dinucleotide"
  misc_feature (61)..(61): /note="Nucleotide may be methylated to form 5-methylcytosine"
aagctgaagatggtgggtaagtggtggatagcagctatagaagtcagaagggagagaaagcgagacaaacagctgctcttgtcagcatggggataagtgtaaagagattaatagttatttga

SEQ ID NO: 3058 - DNA, 122 bp, Homo sapiens
  misc_feature (61)..(62): /note="This region represents a CpG dinucleotide"
  misc_feature (61)..(61): /note="Nucleotide may be methylated to form 5-methylcytosine"
ataagtttggtccagtttctccccatcttgtgtgccacttctgctttttgttttccaccacgggataaccctcaccagatgccggtgccatattcttggacgtcccagcttccagaaccatg

SEQ ID NO: 3059 - DNA, 122 bp, Homo sapiens
  misc_feature (61)..(62): /note="This region represents a CpG dinucleotide"
  misc_feature (61)..(61): /note="Nucleotide may be methylated to form 5-methylcytosine"
atagtgcgggccatcaacagtgtaacctaggtgatatttgtcattttccaaatttgtagccgagatcatctgtagagagtaaacatattaatgagcagcagtaattttgaatcttaaattgt

SEQ ID NO: 3060 - DNA, 122 bp, Homo sapiens
  misc_feature (61)..(62): /note="This region represents a CpG dinucleotide"
  misc_feature (61)..(61): /note="Nucleotide may be methylated to form 5-methylcytosine"
ttaaactgcaatttactgggccccatctcagaactaagaatccgaaggtttggtgggcagcgaatctatgtatcttgaatgaatggatttgttactagaaaggcgtctggatccagacaaga

SEQ ID NO: 3061 - DNA, 122 bp, Homo sapiens
  misc_feature (61)..(62): /note="This region represents a CpG dinucleotide"
  misc_feature (61)..(61): /note="Nucleotide may be methylated to form 5-methylcytosine"
ggtagagaaacagctgatctcgtgttagccactgggtacaactgtgcctgcgtaaccctgcgcttttaaaaaacggaagtcaacgcaaatctcttcctcaggaaattgatatttagactgtg

SEQ ID NO: 3062 - DNA, 122 bp, Homo sapiens
  misc_feature (61)..(62): /note="This region represents a CpG dinucleotide"
  misc_feature (61)..(61): /note="Nucleotide may be methylated to form 5-methylcytosine"
ctggggagagattgcccctgctggcataaggagaggctggtcaattctcagagacagcaacgggcccagccaggagtatgcctgtgacatgcaaactaaccaatccagagtcacaactcctc

SEQ ID NO: 3063 - DNA, 122 bp, Homo sapiens
  misc_feature (61)..(62): /note="This region represents a CpG dinucleotide"
  misc_feature (61)..(61): /note="Nucleotide may be methylated to form 5-methylcytosine"
cacctcacttttttatcttcttttttttcccagcagctttattaagttataattcacacacgatgtaattcgcccatttaaaatgtacaatgggcccggcgcggtggctcacgcctgtaatc

SEQ ID NO: 3064 - DNA, 122 bp, Homo sapiens
  misc_feature (61)..(62): /note="This region represents a CpG dinucleotide"
  misc_feature (61)..(61): /note="Nucleotide may be methylated to form 5-methylcytosine"
tggccttgtggattatgatgtggtagagatgagcaacctggcctaccaagtgctgcatggcgaggcactggctgcacaggccaaggccgcttcggccgccgcctcgctgcgcggcctcaatt

SEQ ID NO: 3065 - DNA, 122 bp, Homo sapiens
  misc_feature (61)..(62): /note="This region represents a CpG dinucleotide"
  misc_feature (61)..(61): /note="Nucleotide may be methylated to form 5-methylcytosine"
tgtaccccttacttacctggtggcatctgagttccacttgccatctctttctacaaatgacgagaaagcacagcaagcctagctggctctgcagctttccatgggaactttgtcttcctcca

SEQ ID NO: 3066 - DNA, 122 bp, Homo sapiens
  misc_feature (61)..(62): /note="This region represents a CpG dinucleotide"
  misc_feature (61)..(61): /note="Nucleotide may be methylated to form 5-methylcytosine"
ttatggttttctctttatgaagttaaactgaaaggcttttctccttgcttaaagggatttcgggagttggcaagcagtttcgagaatagatttctaagtacagtttataaaatgttatctca

SEQ ID NO: 3067 - DNA, 122 bp, Homo sapiens
  misc_feature (61)..(62): /note="This region represents a CpG dinucleotide"
  misc_feature (61)..(61): /note="Nucleotide may be methylated to form 5-methylcytosine"
gcagaatcaagatgatgcttattctatgttggcagaaaagctgagtgttgggagaagctgcggcagggcttgcaggtctgacataatgtaagagtctcagaacatgtctggggtccacggtc

SEQ ID NO: 3068 - DNA, 122 bp, Homo sapiens
  misc_feature (61)..(62): /note="This region represents a CpG dinucleotide"
  misc_feature (61)..(61): /note="Nucleotide may be methylated to form 5-methylcytosine"
tcagggcctgagtgggtggggccctaaacattatccaatcaggatcgctgggctaggaaccgtccaatcaggcacgtagctggagcggacaggacggcttccgggatttggcgcggcctttg

SEQ ID NO: 3069 - DNA, 122 bp, Homo sapiens
  misc_feature (61)..(62): /note="This region represents a CpG dinucleotide"
  misc_feature (61)..(61): /note="Nucleotide may be methylated to form 5-methylcytosine"
ccttgaccattccccatgccttctaatattttattctacccaattctgttttcttttcaacgtcgggtcttattaaattgacttggtgatgcactaatgggtcatgatgcagaatttgaaaa

SEQ ID NO: 3070 - DNA, 122 bp, Homo sapiens
  misc_feature (61)..(62): /note="This region represents a CpG dinucleotide"
  misc_feature (61)..(61): /note="Nucleotide may be methylated to form 5-methylcytosine"
aggggccttccaatttcttttcctctgtttatgggagacccttattacattacgttctctcgccgccctctgtcccggtttccctttctcatgcatagaaataaaggtccaaaaggaataga

SEQ ID NO: 3071 - DNA, 122 bp, Homo sapiens
  misc_feature (61)..(62): /note="This region represents a CpG dinucleotide"
  misc_feature (61)..(61): /note="Nucleotide may be methylated to form 5-methylcytosine"
aacactaagaacagggaagatgtacagaaatcagtcaacaaacctgacctaattgacatacggttgaactaagtatttattaggttggtgcaaaagtaattgtggttacagtaatgttagaa

SEQ ID NO: 3072 - DNA, 122 bp, Homo sapiens
  misc_feature (61)..(62): /note="This region represents a CpG dinucleotide"
  misc_feature (61)..(61): /note="Nucleotide may be methylated to form 5-methylcytosine"
atccctcctcctctttctactccttcctacaagaaccagctccgtgcagccccgcccccacgcggttccgcccacggccccgcccacagcactgcccgccaatcagtgcccgcagccgccgc

SEQ ID NO: 3073 - DNA, 122 bp, Homo sapiens
  misc_feature (61)..(62): /note="This region represents a CpG dinucleotide"
  misc_feature (61)..(61): /note="Nucleotide may be methylated to form 5-methylcytosine"
atgccacaatcttcaccaacagttgagattagccagatgtgtggtcaggtctgatctcaacgcataaagggaatctcatgatctcttaagtatggtgggatgagaaataagttcaagaatac

SEQ ID NO: 3074 - DNA, 122 bp, Homo sapiens
  misc_feature (61)..(62): /note="This region represents a CpG dinucleotide"
  misc_feature (61)..(61): /note="Nucleotide may be methylated to form 5-methylcytosine"
tatttacacattgttagtgagcttaactggatcaacagttcaaagggcaatggtgagaagcgctggcttcctgtggccaggcaacagaaccacctggcatccttggctttagtactacaggt

SEQ ID NO: 3075 - DNA, 122 bp, Homo sapiens
  misc_feature (61)..(62): /note="This region represents a CpG dinucleotide"
  misc_feature (61)..(61): /note="Nucleotide may be methylated to form 5-methylcytosine"
tgttgctggtaattgcatgtacaaaggtctttcaggcaatgatcctttaattagaaattgcgcactgaaaataatggtgcagacttctataactaacaggtggccttcagaagctaattttt

SEQ ID NO: 3076 - DNA, 122 bp, Homo sapiens
  misc_feature (61)..(62): /note="This region represents a CpG dinucleotide"
  misc_feature (61)..(61): /note="Nucleotide may be methylated to form 5-methylcytosine"
ctcaactttttggaaacatgcaacttttactactttaaaatataattggtttctttgtttcgtgcattaaaaacaaggaggaaaaactgaagtctgcccaagccaggtgtttcttgttggca

SEQ ID NO: 3077 - DNA, 122 bp, Homo sapiens
  misc_feature (61)..(62): /note="This region represents a CpG dinucleotide"
  misc_feature (61)..(61): /note="Nucleotide may be methylated to form 5-methylcytosine"
tgttctttaatttcgtcatctttaaaatgggataattacaatcctatctcatagcttaaccgagacagtgtgtgtgtctgtgtgtgtgtaattttatctggtacataagaaatcccatagaa

SEQ ID NO: 3078 - DNA, 122 bp, Homo sapiens
  misc_feature (61)..(62): /note="This region represents a CpG dinucleotide"
  misc_feature (61)..(61): /note="Nucleotide may be methylated to form 5-methylcytosine"
gcatccaggcccctcactcacactttacaggggattcgctctctgtaatagaggggaacacgcagaaaacatggcagatgcagaaggcccaggagcaaacaagggagaacacagcagagcag

SEQ ID NO: 3079 - DNA, 122 bp, Homo sapiens
  misc_feature (61)..(62): /note="This region represents a CpG dinucleotide"
  misc_feature (61)..(61): /note="Nucleotide may be methylated to form 5-methylcytosine"
tatacctctttcctttataaattactcagtctcaggtatttgtttatagcagtgtgagaacggactactgcaattcattgttgggcatgctgaatctaaggtgcatacagggaaatatagtt

SEQ ID NO: 3080 - DNA, 122 bp, Homo sapiens
  misc_feature (61)..(62): /note="This region represents a CpG dinucleotide"
  misc_feature (61)..(61): /note="Nucleotide may be methylated to form 5-methylcytosine"
aaggctattgtgtcagatagtgcagataaagaacattttcatcaatgcagaaaaatctgccggacagcactggccctagaggaaagtcagataaaatgaaaaacaacaatttcgcccgccgg

SEQ ID NO: 3081 - DNA, 122 bp, Homo sapiens
  misc_feature (61)..(62): /note="This region represents a CpG dinucleotide"
  misc_feature (61)..(61): /note="Nucleotide may be methylated to form 5-methylcytosine"
ttccagactagcctggccgacatggtgaaacccggtctctactaaaaatacaaaattagccgggagtgcacacccgtaatgccagctactcggaagactgaggcaggagaatcgcttgaacc

SEQ ID NO: 3082 - DNA, 122 bp, Homo sapiens
  misc_feature (61)..(62): /note="This region represents a CpG dinucleotide"
  misc_feature (61)..(61): /note="Nucleotide may be methylated to form 5-methylcytosine"
cagggatgagatgctcgcttcacctgttgggacctggagcaagttgggctgtactggagacgtttcctgttgtaattcagttaactcttttttttttttgacggagtcttgctgtgttgccc

SEQ ID NO: 3083 - DNA, 122 bp, Homo sapiens
  misc_feature (61)..(62): /note="This region represents a CpG dinucleotide"
  misc_feature (61)..(61): /note="Nucleotide may be methylated to form 5-methylcytosine"
tctgaagaagttagagggtagtttatactctggcctaagaaaggcttcactgttagtaggcgtgaggtcgtagtgaggtagtttaactgctttagaactttgtgcttggaacattcttagcc

SEQ ID NO: 3084 - DNA, 122 bp, Homo sapiens
  misc_feature (61)..(62): /note="This region represents a CpG dinucleotide"
  misc_feature (61)..(61): /note="Nucleotide may be methylated to form 5-methylcytosine"
aagttaaggcatttttaatcacaagaagagatagaaggtcagcaaaagatacaggtcatacggaccttgcagataaaacaggttgcagtaaagacgttggctaaatcccactaaaaccaaga

SEQ ID NO: 3085 - DNA, 122 bp, Homo sapiens
  misc_feature (61)..(62): /note="This region represents a CpG dinucleotide"
  misc_feature (61)..(61): /note="Nucleotide may be methylated to form 5-methylcytosine"
aaacagaaactgggtggagactgtctcaaaatatgtaggacatttgtgacaagctggggacggaccaagaaggtggtgctgaggcagcactaatatgaattagcgttacaacaatgtcccag

SEQ ID NO: 3086 - DNA, 122 bp, Homo sapiens
  misc_feature (61)..(62): /note="This region represents a CpG dinucleotide"
  misc_feature (61)..(61): /note="Nucleotide may be methylated to form 5-methylcytosine"
cctctccacatggcagctcacaccttggaagcctgcttcatcaaagccaggagttaagagcgtgaaaacaaggtagaaattacagctttcataaccgcatcttggatgtggctacacatcac

SEQ ID NO: 3087 - DNA, 122 bp, Homo sapiens
  misc_feature (61)..(62): /note="This region represents a CpG dinucleotide"
  misc_feature (61)..(61): /note="Nucleotide may be methylated to form 5-methylcytosine"
aagtcctcttgacttctctaaccagaattagcttccccttctccctgctctcgtagcccacgcacaccctccgcctctggacttcatttaggaaatggtagttttttgtttacttgtctatt

SEQ ID NO: 3088 - DNA, 122 bp, Homo sapiens
  misc_feature (61)..(62): /note="This region represents a CpG dinucleotide"
  misc_feature (61)..(61): /note="Nucleotide may be methylated to form 5-methylcytosine"
aggaaagagcggcctcctcaggcctcccgatccgtcttctgtgagacaactgcaggcaggcgtaggttacttattagctcctggtaggaagcacgtagaccaaggacatcaacagaacctgc

SEQ ID NO: 3089 - DNA, 122 bp, Homo sapiens
  misc_feature (61)..(62): /note="This region represents a CpG dinucleotide"
  misc_feature (61)..(61): /note="Nucleotide may be methylated to form 5-methylcytosine"
ccaagaatcctgctaggatattagcaacaggagcagcactgagctccacttcatggtggtcgtgagccaaggtcaagattacatgtcaaaaaattaatatccattcattttctggctctggc

SEQ ID NO: 3090 - DNA, 122 bp, Homo sapiens
  misc_feature (61)..(62): /note="This region represents a CpG dinucleotide"
  misc_feature (61)..(61): /note="Nucleotide may be methylated to form 5-methylcytosine"
ccgcccgggagatgcttcctcgcgcggcgcagcgctgaggccgtgcgtgcgccccggctgcgctgcgcgctccccacatacacaagctctccatgtgagctgacaggcgagtggaaacccct

SEQ ID NO: 3091 - DNA, 122 bp, Homo sapiens
  misc_feature (61)..(62): /note="This region represents a CpG dinucleotide"
  misc_feature (61)..(61): /note="Nucleotide may be methylated to form 5-methylcytosine"
gaaataatttatcttttacagtaaaagtatagagtattacatcataaaatacattggctacggtgttagttcttggacatctggttctagattacagtgactcagtagagtttgtgatgatc

SEQ ID NO: 3092 - DNA, 122 bp, Homo sapiens
  misc_feature (61)..(62): /note="This region represents a CpG dinucleotide"
  misc_feature (61)..(61): /note="Nucleotide may be methylated to form 5-methylcytosine"
ggccgaggctgcactaagccatgatcatgccactgtactccagtcacatgggcaacagagcgagatcttgtctcaaaaaaagaaaaaattgttgaaatactctgaactatatgggctgaatg

SEQ ID NO: 3093 - DNA, 122 bp, Homo sapiens
  misc_feature (61)..(62): /note="This region represents a CpG dinucleotide"
  misc_feature (61)..(61): /note="Nucleotide may be methylated to form 5-methylcytosine"
gtaactgtgttaccttacatgataaaagggactaaaaaagggactttgccgatgtgaagacgttaaggatcctgagatggggaaagtatcctggattactcgactgagcctgatctactcac

SEQ ID NO: 3094 - DNA, 122 bp, Homo sapiens
  misc_feature (61)..(62): /note="This region represents a CpG dinucleotide"
  misc_feature (61)..(61): /note="Nucleotide may be methylated to form 5-methylcytosine"
agccctgtgaataatctctaaacacattggcacactcagtagacaaacattatcttcactcgcactgttcttccatatggtctcctcccatggtgatggagggcaccctgctgtttcaatca

SEQ ID NO: 3095 - DNA, 122 bp, Homo sapiens
  misc_feature (61)..(62): /note="This region represents a CpG dinucleotide"
  misc_feature (61)..(61): /note="Nucleotide may be methylated to form 5-methylcytosine"
agtgggatgctttgaaaatgcaagtctgaccatgctactcctcagctcagaaacttccagcggctgccatttcactgggtgaaagctgaagtcttgaagtctttgtggaggtttacaaggcc

SEQ ID NO: 3096 - DNA, 122 bp, Homo sapiens
  misc_feature (61)..(62): /note="This region represents a CpG dinucleotide"
  misc_feature (61)..(61): /note="Nucleotide may be methylated to form 5-methylcytosine"
caagcctgtcttagagcaaacttttcaccatgaggcccgggaagtaaaccctgcattcaacggaagcaagaagcctcagaaacaaatgggtgcctctaaataaagcattcctttacatttat

SEQ ID NO: 3097 - DNA, 122 bp, Homo sapiens
  misc_feature (61)..(62): /note="This region represents a CpG dinucleotide"
  misc_feature (61)..(61): /note="Nucleotide may be methylated to form 5-methylcytosine"
tgtggggggcaccagttgggagttaattgaatcatggggcggtttcccccacattgttctcgtggtagtgaataagtctcatgagagctgatggttttataatgggaaacctctttcacttg

SEQ ID NO: 3098 - DNA, 122 bp, Homo sapiens
  misc_feature (61)..(62): /note="This region represents a CpG dinucleotide"
  misc_feature (61)..(61): /note="Nucleotide may be methylated to form 5-methylcytosine"
gttgtcttttctcttgcttggttggggctgcggtgagagtgtctctgaggcatactttcccgcctctcttacgctaggatctgcacacctcctctcaaacactcttctgagcacgctcagcg

SEQ ID NO: 3099 - DNA, 122 bp, Homo sapiens
  misc_feature (61)..(62): /note="This region represents a CpG dinucleotide"
  misc_feature (61)..(61): /note="Nucleotide may be methylated to form 5-methylcytosine"
gagaacaagataagcaaggtcttgacccttacagacctcacagtggggaactctatggctcgatgactatatccacaggattttaatttatggaggtgaccaagtgatgacacaaagagcct

SEQ ID NO: 3100 - DNA, 122 bp, Homo sapiens
  misc_feature (61)..(62): /note="This region represents a CpG dinucleotide"
  misc_feature (61)..(61): /note="Nucleotide may be methylated to form 5-methylcytosine"
gtctggaaagttctatcaggtgcttgttcctctcccttgattttccagcactcaggttcacgagtggtttccaagccaggctgggtgtgcctttgtagatatcaccataaactcaccgatgt

SEQ ID NO: 3101 - DNA, 122 bp, Homo sapiens
  misc_feature (61)..(62): /note="This region represents a CpG dinucleotide"
  misc_feature (61)..(61): /note="Nucleotide may be methylated to form 5-methylcytosine"
ccggtgatgaacatgacagacaagattcctgcccccaaggagctgcaccttaataagtcccgcaatgaaggagacagaacataaacagaggaaaatacacaagatgccagcttgtgagaagt

SEQ ID NO: 3102 - DNA, 122 bp, Homo sapiens
  misc_feature (61)..(62): /note="This region represents a CpG dinucleotide"
  misc_feature (61)..(61): /note="Nucleotide may be methylated to form 5-methylcytosine"
ctgagctttgataaatgatagatatgatgatgagcacatgttagtgatattactgctctgcgggacgtctgaatcagtaattgctgtcttttaagcatctgttgtgtgccaaatactgcact

SEQ ID NO: 3103 - DNA, 122 bp, Homo sapiens
  misc_feature (61)..(62): /note="This region represents a CpG dinucleotide"
  misc_feature (61)..(61): /note="Nucleotide may be methylated to form 5-methylcytosine"
gcgtggacatttgcctcccttttataatagctgtattcaaatgaggtatcctggaagcctcgttctgataggatgagagcagactctgtactacaacacggattggataatagtctccaact

SEQ ID NO: 3104 - DNA, 122 bp, Homo sapiens
  misc_feature (61)..(62): /note="This region represents a CpG dinucleotide"
  misc_feature (61)..(61): /note="Nucleotide may be methylated to form 5-methylcytosine"
acaaaagaaaatttgcatctgactgctcttaactacacaagggaatcaggcttaacaacacgctcagcagctgtgtgactatggccaatttgcttaagctctgtgcttcagtttcctactgc

SEQ ID NO: 3105 - DNA, 122 bp, Homo sapiens
  misc_feature (61)..(62): /note="This region represents a CpG dinucleotide"
  misc_feature (61)..(61): /note="Nucleotide may be methylated to form 5-methylcytosine"
agatggttgggtcttcctgtccccagaactcccggcagcgctcactgtcttgccggtgcacgtccgtcattggtcctagagcctggatgtctgggggacatctcctcacttgtgtcctaaca

SEQ ID NO: 3106 - DNA, 122 bp, Homo sapiens
  misc_feature (61)..(62): /note="This region represents a CpG dinucleotide"
  misc_feature (61)..(61): /note="Nucleotide may be methylated to form 5-methylcytosine"
atctcaagaatgaaagtgctgtgagcactgtagatgcgaacagggaaagaactgagctgacgcacagcctcagcacaggggcccaggctcaacgggcactcaagattcagagcacaagcatt

SEQ ID NO: 3107 - DNA, 122 bp, Homo sapiens
  misc_feature (61)..(62): /note="This region represents a CpG dinucleotide"
  misc_feature (61)..(61): /note="Nucleotide may be methylated to form 5-methylcytosine"
caaactcctgtttccatgggagctcaggtaacctaatgagagacgcggctgggcgggggccgtgcagaagcacagagtatactcatcaagggaggatggctgggacttagctctggcccatt

SEQ ID NO: 3108 - DNA, 122 bp, Homo sapiens
  misc_feature (61)..(62): /note="This region represents a CpG dinucleotide"
  misc_feature (61)..(61): /note="Nucleotide may be methylated to form 5-methylcytosine"
agatagtggagagattcctaacgttgtcaaggctggccacaaggctgtactgatcatcctcgtcttggatctgttgggtcagaaggggcatcgtccactgcgcattcggccccgagggatgc

SEQ ID NO: 3109 - DNA, 122 bp, Homo sapiens
  misc_feature (61)..(62): /note="This region represents a CpG dinucleotide"
  misc_feature (61)..(61): /note="Nucleotide may be methylated to form 5-methylcytosine"
atttttttttaaatgatgagaagccgcaccgggtcggggcaggcttccgggaggcgggcgcggggccccggggccgggtcgcgttggtcccgcgccgggggcggggcgcggcgtgggctggg

SEQ ID NO: 3110 - DNA, 122 bp, Homo sapiens
  misc_feature (61)..(62): /note="This region represents a CpG dinucleotide"
  misc_feature (61)..(61): /note="Nucleotide may be methylated to form 5-methylcytosine"
tgagggcccagcctgcagtggttgtcatcctcactgactaagagggagtggatctaatcccggtgcattcgcctggcattcagcatcctgcctgtctagccttatcgccactctcctccctc

SEQ ID NO: 3111 - DNA, 122 bp, Homo sapiens
  misc_feature (61)..(62): /note="This region represents a CpG dinucleotide"
  misc_feature (61)..(61): /note="Nucleotide may be methylated to form 5-methylcytosine"
aggtttacgacttcgcctacttgctgcaggtcagtgactggctttgaggttggtacattccgcattatacccatgttgagacagtctaaaatcccacgtgcttagggtgtgtctcagtccat

SEQ ID NO: 3112 - DNA, 122 bp, Homo sapiens
  misc_feature (61)..(62): /note="This region represents a CpG dinucleotide"
  misc_feature (61)..(61): /note="Nucleotide may be methylated to form 5-methylcytosine"
gatccctgaaaaggcccttaattcagctctatgagccattttcagagcagtttttcaatccgttctataataataatgatcatatatgacatatatatatattttgagatggagtctcactc

SEQ ID NO: 3113 - DNA, 122 bp, Homo sapiens
  misc_feature (61)..(62): /note="This region represents a CpG dinucleotide"
  misc_feature (61)..(61): /note="Nucleotide may be methylated to form 5-methylcytosine"
agattgagatcatttttaaaggagcttgtccctacctgcttctgtaacatatctgctacacgtggaaagaaggtagccagtgaacatgcaaacaacacagacacagtgagaattgtagagaa

SEQ ID NO: 3114 - DNA, 122 bp, Homo sapiens
  misc_feature (61)..(62): /note="This region represents a CpG dinucleotide"
  misc_feature (61)..(61): /note="Nucleotide may be methylated to form 5-methylcytosine"
gggaaaagttaacattgcttcaccccgtgccataaatggatgacactttcaggattgtggcgctaaagacagagagtctgagaaaaactggaaagcagcaagcttgcctcatgaacagaaca

SEQ ID NO: 3115 - DNA, 122 bp, Homo sapiens
  misc_feature (61)..(62): /note="This region represents a CpG dinucleotide"
  misc_feature (61)..(61): /note="Nucleotide may be methylated to form 5-methylcytosine"
aacacatcctacctatactgcctcccaaaaggaagactgtagcaacagccgaagcagtaacgtcagaagctacctgacttactgtcacgtgtccagtgttagatggaacattgtaaactcca

SEQ ID NO: 3116 - DNA, 122 bp, Homo sapiens
  misc_feature (61)..(62): /note="This region represents a CpG dinucleotide"
  misc_feature (61)..(61): /note="Nucleotide may be methylated to form 5-methylcytosine"
catttctctttattctttcagcagcacttgatcaccaggctggtacaagtgacacagtttcgctgagtttacgatactcctgttgcaagcaagcttatgcaaaacattaagtatttgtccca

SEQ ID NO: 3117 - DNA, 122 bp, Homo sapiens
  misc_feature (61)..(62): /note="This region represents a CpG dinucleotide"
  misc_feature (61)..(61): /note="Nucleotide may be methylated to form 5-methylcytosine"
ccgggctcaagtgatcctctcacctcagcctccccaaaatgctaggattacagaggtgagcgactgtgcctggctgatgccttgctgtataaactgcagcctgctggctctccctctccaac

SEQ ID NO: 3118 - DNA, 122 bp, Homo sapiens
  misc_feature (61)..(62): /note="This region represents a CpG dinucleotide"
  misc_feature (61)..(61): /note="Nucleotide may be methylated to form 5-methylcytosine"
tgcagatcagactgccattccggttccagctcacattgtaaatcatgtctgaatgcatatcgtccaagtttataagggcttcccctgttcccacattccagatgataatggcattatcacag

SEQ ID NO: 3119 - DNA, 122 bp, Homo sapiens
  misc_feature (61)..(62): /note="This region represents a CpG dinucleotide"
  misc_feature (61)..(61): /note="Nucleotide may be methylated to form 5-methylcytosine"
aggcctatcaaattgcccctgaaagtagctatagaaattttgccatccactggccaggcacggtggctcacgcctgtaatcccagcactttgggaggctgaggcaggcagatcacgagctca

SEQ ID NO: 3120 - DNA, 122 bp, Homo sapiens
  misc_feature (61)..(62): /note="This region represents a CpG dinucleotide"
  misc_feature (61)..(61): /note="Nucleotide may be methylated to form 5-methylcytosine"
ggaatcacccaagaaactatgagaatgaggaacaaatacaaacaccgtaaaaccaagagacgctaaagaatccaaatctcagagtcaaaggaagggctgatgaaaggaaggatggcaggagt

SEQ ID NO: 3121 - DNA, 122 bp, Homo sapiens
  misc_feature (61)..(62): /note="This region represents a CpG dinucleotide"
  misc_feature (61)..(61): /note="Nucleotide may be methylated to form 5-methylcytosine"
aggctgtgtgcacagggcatgccgcaggtgggttctcaatgagccgctccacatgggatgcgaggcttctggccaagagcacgtctattaacagcacttttggggacatctaacagactctc

SEQ ID NO: 3122 - DNA, 122 bp, Homo sapiens
  misc_feature (61)..(62): /note="This region represents a CpG dinucleotide"
  misc_feature (61)..(61): /note="Nucleotide may be methylated to form 5-methylcytosine"
ggagataacaacatcttattttcagtctgaatcatttctcatgacctgttcatttttagccgcatgctcattcttctgtataccatagtcataggtttttgttcatctctgcactgccctgc

SEQ ID NO: 3123 - DNA, 122 bp, Homo sapiens
  misc_feature (61)..(62): /note="This region represents a CpG dinucleotide"
  misc_feature (61)..(61): /note="Nucleotide may be methylated to form 5-methylcytosine"
cgggaagggctccgtgcccagtagaggtgcagtgcagcagccagctcgcagcagtgctcccgtagagctgatggcattggcaggagtggcggctcagcacagggaagttctccagtgcccag

SEQ ID NO: 3124 - DNA, 122 bp, Homo sapiens
  misc_feature (61)..(62): /note="This region represents a CpG dinucleotide"
  misc_feature (61)..(61): /note="Nucleotide may be methylated to form 5-methylcytosine"
accccagaggaaagtcctgctagcagtttttgtgtattcttccagaaatttgccttgcaacgcgtttgagtatataaataatcccagaaaggatgggccagacactagcagaaactcaccac

SEQ ID NO: 3125 - DNA, 122 bp, Homo sapiens
  misc_feature (61)..(62): /note="This region represents a CpG dinucleotide"
  misc_feature (61)..(61): /note="Nucleotide may be methylated to form 5-methylcytosine"
tcatgtcctaatgcaatattataagacattgtaccacaacattccaatctaggctgctaacgcaatatgacatttctgtattatttgaatgcaattctaatacgacactctaaaataactaa

SEQ ID NO: 3126 - DNA, 122 bp, Homo sapiens
  misc_feature (61)..(62): /note="This region represents a CpG dinucleotide"
  misc_feature (61)..(61): /note="Nucleotide may be methylated to form 5-methylcytosine"
cctgggtttctggcctgcagaaactgtgaggtaataaacttgagttgttttaagccattacgtggtaatttgctacatcagccggagaaagccaatacagctgttgtcatggcttctctctt

SEQ ID NO: 3127 - DNA, 122 bp, Homo sapiens
  misc_feature (61)..(62): /note="This region represents a CpG dinucleotide"
  misc_feature (61)..(61): /note="Nucleotide may be methylated to form 5-methylcytosine"
tgtttccctacagagaaatgtccagtggttctatcttcaatctctcttctttaaatagcacgaagatgtcaattcaaaatattaatccaaagtaataaaaatgtcagaaacaactcacgtaa

SEQ ID NO: 3128 - DNA, 122 bp, Homo sapiens
  misc_feature (61)..(62): /note="This region represents a CpG dinucleotide"
  misc_feature (61)..(61): /note="Nucleotide may be methylated to form 5-methylcytosine"
aaagaaatggaaattatctgaatgcctgacaaagggggattggttaattaaatcacagtacgtctactcaagggaatattgtgtggccattaatctatgacttagaacagggattgtagata

SEQ ID NO: 3129 - DNA, 122 bp, Homo sapiens
  misc_feature (61)..(62): /note="This region represents a CpG dinucleotide"
  misc_feature (61)..(61): /note="Nucleotide may be methylated to form 5-methylcytosine"
agttcgagacagccttaccaacatggacaaaccccatctctactaacatacaaaattagccgggtgtggttgtgcatgcctgtaatgctagctactcaggaggctgaggcaagagaatcgct

SEQ ID NO: 3130 - DNA, 122 bp, Homo sapiens
  misc_feature (61)..(62): /note="This region represents a CpG dinucleotide"
  misc_feature (61)..(61): /note="Nucleotide may be methylated to form 5-methylcytosine"
gaggtcagggtcatcagtgcagcaagtggtaaggttgggttgtcagtacagctgacctcacggtaagtccaactgtggctctccacccagggagactttgatttaaatctttttcttcttaa

SEQ ID NO: 3131 - DNA, 122 bp, Homo sapiens
  misc_feature (61)..(62): /note="This region represents a CpG dinucleotide"
  misc_feature (61)..(61): /note="Nucleotide may be methylated to form 5-methylcytosine"
aagttcagcttgtatttaaagatgagtcagtttgaggcatgaaggtccaaatgtacagatcgtaggctgacagtaggtaggcaaataacgatagtaagtttaaggaaacaagttataataaa

SEQ ID NO: 3132 - DNA, 122 bp, Homo sapiens
  misc_feature (61)..(62): /note="This region represents a CpG dinucleotide"
  misc_feature (61)..(61): /note="Nucleotide may be methylated to form 5-methylcytosine"
ttagtatcaattagcctatggccaaattggtttccttatacatcgttttgcttgaagttgcgtttccaagattttattgacaatgttaagtgaggacttactgtacagcgtgggggtcaggt

SEQ ID NO: 3133 - DNA, 122 bp, Homo sapiens
  misc_feature (61)..(62): /note="This region represents a CpG dinucleotide"
  misc_feature (61)..(61): /note="Nucleotide may be methylated to form 5-methylcytosine"
cagcaaggtctttacgacctgtatgtcctgccaactttttatttcatctctatttcatctcgtgactaacaatgccttaacttcctaggaatgcagcctggtaggtctcagccttattttac

SEQ ID NO: 3134 - DNA, 122 bp, Homo sapiens
  misc_feature (61)..(62): /note="This region represents a CpG dinucleotide"
  misc_feature (61)..(61): /note="Nucleotide may be methylated to form 5-methylcytosine"
ctctccatttttggatgacttggcattgtctcacgaatcagctacttgcaggatttccagcgggcacagaaacgggatgcttgcccagacttcaaagtttggcaaacataatgagatagacc

SEQ ID NO: 3135 - DNA, 122 bp, Homo sapiens
  misc_feature (61)..(62): /note="This region represents a CpG dinucleotide"
  misc_feature (61)..(61): /note="Nucleotide may be methylated to form 5-methylcytosine"
ttcctgcaccgtcctgcgtatctctagcgatgccatttacattgtgttccgtgggtaaggcggtgctgctgacatgcagggactcccacccaccaagggaagcttttaaaaagtttttttaa

SEQ ID NO: 3136 - DNA, 122 bp, Homo sapiens
  misc_feature (61)..(62): /note="This region represents a CpG dinucleotide"
  misc_feature (61)..(61): /note="Nucleotide may be methylated to form 5-methylcytosine"
attaggccataaaaaacagtttacggcccttctggttggaacaataactttcacagtatccgtagtggctgagtggttatcagaggaagaaagaccactagcagtctgcgtccttgctgtct

SEQ ID NO: 3137 - DNA, 122 bp, Homo sapiens
  misc_feature (61)..(62): /note="This region represents a CpG dinucleotide"
  misc_feature (61)..(61): /note="Nucleotide may be methylated to form 5-methylcytosine"
atcacggggctgctgtgacctgtggcacaggtgccattgaggacatgtcctgcactagctcgtgtctggtccgatgtgcgtgccggctgtgccgagggcagcagcttccgtgttcctggtcg

SEQ ID NO: 3138 - DNA, 122 bp, Homo sapiens
  misc_feature (61)..(62): /note="This region represents a CpG dinucleotide"
  misc_feature (61)..(61): /note="Nucleotide may be methylated to form 5-methylcytosine"
ttactttctctggcctgttttttttttttttccagttgtcagtggggttaataataataacgcctatttcatagggttgctgcaaggattcaatgaggtaatacaggcatacctcagagata

SEQ ID NO: 3139 - DNA, 122 bp, Homo sapiens
  misc_feature (61)..(62): /note="This region represents a CpG dinucleotide"
  misc_feature (61)..(61): /note="Nucleotide may be methylated to form 5-methylcytosine"
tatgggcttctaccatttcccccattcctgtctccatctcagagatcctctttgtgctgtcgatggaaaagattgttaacatctactggaatgcttgggaaactctgtaagttggtgagacc

SEQ ID NO: 3140 - DNA, 122 bp, Homo sapiens
  misc_feature (61)..(62): /note="This region represents a CpG dinucleotide"
  misc_feature (61)..(61): /note="Nucleotide may be methylated to form 5-methylcytosine"
aaagccccttataaaaccatcagatctcgtgagaactcactcgctatcacgagaacagcacggaggtagccgccccgaggattaaattacctcccactgggtccctcccatgtcacgtgggg

SEQ ID NO: 3141 - DNA, 122 bp, Homo sapiens
  misc_feature (61)..(62): /note="This region represents a CpG dinucleotide"
  misc_feature (61)..(61): /note="Nucleotide may be methylated to form 5-methylcytosine"
gtccatgagagcagggccaagaacgcctaagcccaccagtaagatgcaagaacacctgtgcgaaataataataatgatcatagctgggtgtggtgcctgacagctgtaatcccagcactcag

SEQ ID NO: 3142 - DNA, 122 bp, Homo sapiens
  misc_feature (61)..(62): /note="This region represents a CpG dinucleotide"
  misc_feature (61)..(61): /note="Nucleotide may be methylated to form 5-methylcytosine"
ccccggttccccggcgcctgggctgcgcggagtccctgtcccgcgtcccggacccctacgcgcagcctccacgcgctccgagctggagaagccgccagcccgccctcccagggcgtgtcgcc

SEQ ID NO: 3143 - DNA, 122 bp, Homo sapiens
  misc_feature (61)..(62): /note="This region represents a CpG dinucleotide"
  misc_feature (61)..(61): /note="Nucleotide may be methylated to form 5-methylcytosine"
acatctctgaaggttatgccggtttacattccttcagcagtccgaccagtccccagcagccgcaccctcgctaaccccagggcaagttacatacagagtggcctgctgtgccaaaggagcta

SEQ ID NO: 3144 - DNA, 122 bp, Homo sapiens
  misc_feature (61)..(62): /note="This region represents a CpG dinucleotide"
  misc_feature (61)..(61): /note="Nucleotide may be methylated to form 5-methylcytosine"
ggaggtgggaggatcgctcgagcccgagaggttggtcggggcctcagtgagccgaaatcacgccactgcactccagcctgggcgacggagcgagaccctgtctcagaaagaaaaagaaaaac

SEQ ID NO: 3145 - DNA, 122 bp, Homo sapiens
  misc_feature (61)..(62): /note="This region represents a CpG dinucleotide"
  misc_feature (61)..(61): /note="Nucleotide may be methylated to form 5-methylcytosine"
gatggttaatttcatgtgtcaacttgagtaggctaagggatactcagacggctggtaaaacgttatttccaggtgtctgtgaaggtgttcctggaagagattagcatttcaatcagctgagt

SEQ ID NO: 3146 - DNA, 122 bp, Homo sapiens
  misc_feature (61)..(62): /note="This region represents a CpG dinucleotide"
  misc_feature (61)..(61): /note="Nucleotide may be methylated to form 5-methylcytosine"
taaattggttcacaggataagaggacacccaatcatgtaaaaactggtacaagccaggcacggtgtcttaggcctgtaatcccagcactttggaaggccaaggcgggtggatcacctaaggt

SEQ ID NO: 3147 - DNA, 122 bp, Homo sapiens
  misc_feature (61)..(62): /note="This region represents a CpG dinucleotide"
  misc_feature (61)..(61): /note="Nucleotide may be methylated to form 5-methylcytosine"
agaaacttctgatgacctgggttggagaccaggcacagaagtgtatccctctcagcactacgacaatcatggccaaagcacgaagtttgtttgcaatgttcagagaaaaggccggacctaac

SEQ ID NO: 3148 - DNA, 122 bp, Homo sapiens
  misc_feature (61)..(62): /note="This region represents a CpG dinucleotide"
  misc_feature (61)..(61): /note="Nucleotide may be methylated to form 5-methylcytosine"
ttaattggtttgtagtctaagctgcctctgtttcacaaagcttttgtagcaagctgttttcgcaagtcactgaccagcctacagattggctttttctgggtcaggtgtcttctctgtaccaa

SEQ ID NO: 3149 - DNA, 122 bp, Homo sapiens
  misc_feature (61)..(62): /note="This region represents a CpG dinucleotide"
  misc_feature (61)..(61): /note="Nucleotide may be methylated to form 5-methylcytosine"
ggtgatctcccagctttcattccacaattactttgtgttcatccatgcaatttggacagacgtaatacaccgcacagcaggtccaagaattgtccaactggccaaaagttatcagagttacc

SEQ ID NO: 3150 - DNA, 122 bp, Homo sapiens
  misc_feature (61)..(62): /note="This region represents a CpG dinucleotide"
  misc_feature (61)..(61): /note="Nucleotide may be methylated to form 5-methylcytosine"
gcctaggctggagtgcaatggcgtgttggctcactgcaacttctgcttcccaggttcatacgattctcatgtctcagcctcctgagtagctgggattgcaggcgtgcaccaccacgcccaga

SEQ ID NO: 3151 - DNA, 122 bp, Homo sapiens
  misc_feature (61)..(62): /note="This region represents a CpG dinucleotide"
  misc_feature (61)..(61): /note="Nucleotide may be methylated to form 5-methylcytosine"
tggttcaatcagcctgctaaactatatggaacctcattttcatgggccacttatttaagccgggggaccttggaaagtctctcatgtctctcatctcaacggcctaatgtgacttctcttga

SEQ ID NO: 3152 - DNA, 122 bp, Homo sapiens
  misc_feature (61)..(62): /note="This region represents a CpG dinucleotide"
  misc_feature (61)..(61): /note="Nucleotide may be methylated to form 5-methylcytosine"
agaggcaggtttgagttgagaactcagttttgccaagaaaacagagatcaacctggaatgcgcagagactttagcctccaggatgagactgcagccaccttgaatagccaaggcttgtttta

SEQ ID NO: 3153 - DNA, 122 bp, Homo sapiens
  misc_feature (61)..(62): /note="This region represents a CpG dinucleotide"
  misc_feature (61)..(61): /note="Nucleotide may be methylated to form 5-methylcytosine"
ctgactattaactgattcacttttcatgacccagcctcggaagtcacataggctcctttccgatgtagtcacaagtctagtcagcttcaagggcagggaacatagattccatctcttggtag

SEQ ID NO: 3154 - DNA, 122 bp, Homo sapiens
  misc_feature (61)..(62): /note="This region represents a CpG dinucleotide"
  misc_feature (61)..(61): /note="Nucleotide may be methylated to form 5-methylcytosine"
aaatcagcatttcccactcagcatcgagccaaaattgactgctgtctctatataataaagcggcatattttgcctctatcttctaattggaagacagaaagtctcaacaaacagaacatgtt

SEQ ID NO: 3155 - DNA, 122 bp, Homo sapiens
  misc_feature (61)..(62): /note="This region represents a CpG dinucleotide"
  misc_feature (61)..(61): /note="Nucleotide may be methylated to form 5-methylcytosine"
tgtggagaaaggggaatcctcatacactgttggtgggaatgtgaattagtatagccactacggagaacagtatggaggtttgtcaaaaaactgaaaatagaactaccatgtgctccagcaat

SEQ ID NO: 3156 - DNA, 122 bp, Homo sapiens
  misc_feature (61)..(62): /note="This region represents a CpG dinucleotide"
  misc_feature (61)..(61): /note="Nucleotide may be methylated to form 5-methylcytosine"
gctctggacagaagcctgggattagtgagctgtgattacatcactccttttctgctcctccgcctttaagagcaagcttctttatgctatccctggatggttttgttccaacccctatgcta

SEQ ID NO: 3157 - DNA, 122 bp, Homo sapiens
  misc_feature (61)..(62): /note="This region represents a CpG dinucleotide"
  misc_feature (61)..(61): /note="Nucleotide may be methylated to form 5-methylcytosine"
cacaatagtgctaacagaaaatttgcctctaaataggtcataaaatcccagccaaactttcgcacacagcatgatcaatggcatcctagttttttattaatattcattattaatttaatatt

SEQ ID NO: 3158 - DNA, 122 bp, Homo sapiens
  misc_feature (61)..(62): /note="This region represents a CpG dinucleotide"
  misc_feature (61)..(61): /note="Nucleotide may be methylated to form 5-methylcytosine"
cctcttacacatatgggtcgatgcctcacgtctccctaacgtgtaaaactgagctgtgcccggccaccttgggcacacgtcctcaggacctcccgaggctgtcacgggcctgtccttaactt

SEQ ID NO: 3159 - DNA, 122 bp, Homo sapiens
  misc_feature (61)..(62): /note="This region represents a CpG dinucleotide"
  misc_feature (61)..(61): /note="Nucleotide may be methylated to form 5-methylcytosine"
caggtcaacggaaaagggagccggggtcctggcagaagcgtagtgccagccgcaatagggcggccgtgggtgcaaacggaggggagcgccggcagctagcaccgcgcggcgactaacgggcc

SEQ ID NO: 3160 - DNA, 122 bp, Homo sapiens
  misc_feature (61)..(62): /note="This region represents a CpG dinucleotide"
  misc_feature (61)..(61): /note="Nucleotide may be methylated to form 5-methylcytosine"
gcggccgcggctgctgctgcggcggcggcggcggtggtggcggcggtggggtggcgggagcggagcggcatggccacggcggcttctaacccctacctgccggggaacagcctgctcgcggc

SEQ ID NO: 3161 - DNA, 122 bp, Homo sapiens
  misc_feature (61)..(62): /note="This region represents a CpG dinucleotide"
  misc_feature (61)..(61): /note="Nucleotide may be methylated to form 5-methylcytosine"
gggcccagtgccagtgggagaatgaagtcaaaatcggagctcaaatgcatgatgcctacacggtgaacaattagaaaggctatagcttagatgactagtagagtttgttaactcattaactc

SEQ ID NO: 3162 - DNA, 122 bp, Homo sapiens
  misc_feature (61)..(62): /note="This region represents a CpG dinucleotide"
  misc_feature (61)..(61): /note="Nucleotide may be methylated to form 5-methylcytosine"
tgggactggcatctgaagtggaggacactcttgtgggactgagaccttagcctgcaggatcgggtactgtctccagggagaaagcgtcacaatggaacagggttggaggacgcccagcgggt

SEQ ID NO: 3163 - DNA, 122 bp, Homo sapiens
  misc_feature (61)..(62): /note="This region represents a CpG dinucleotide"
  misc_feature (61)..(61): /note="Nucleotide may be methylated to form 5-methylcytosine"
gacatgagccactgcacccggcctgtagtgacttgttaatgcataagccttctggctttacgacttctgccttgtaattcccacagcttgggcagattcattcaacctggggttccgatgtg

SEQ ID NO: 3164 - DNA, 122 bp, Homo sapiens
  misc_feature (61)..(62): /note="This region represents a CpG dinucleotide"
  misc_feature (61)..(61): /note="Nucleotide may be methylated to form 5-methylcytosine"
gtgggtgagaggccgctcgatgagggggtttcgggagcggcggggcctaggtctgggaagcgggagcctggaaacaccacgaacgatgctggaaattgtctctgaggcgactgggaagaaaa

SEQ ID NO: 3165 - DNA, 122 bp, Homo sapiens
  misc_feature (61)..(62): /note="This region represents a CpG dinucleotide"
  misc_feature (61)..(61): /note="Nucleotide may be methylated to form 5-methylcytosine"
gccctgggctcccttcagctgcctgggccctaccctggagactgactcagtgaattgagccgcagtcttggtatctggaaggctaacaggtcttcccagctgattgtgctgcaggtgttgga

SEQ ID NO: 3166 - DNA, 122 bp, Homo sapiens
  misc_feature (61)..(62): /note="This region represents a CpG dinucleotide"
  misc_feature (61)..(61): /note="Nucleotide may be methylated to form 5-methylcytosine"
atttttgtatctgactcttttcacttaatataatgttttcaaggttcatccccattgtagcgtgtatgagtactttatttctttttgttgttagacaatatttttactcaacttgcactgtt

SEQ ID NO: 3167 - DNA, 122 bp, Homo sapiens
  misc_feature (61)..(62): /note="This region represents a CpG dinucleotide"
  misc_feature (61)..(61): /note="Nucleotide may be methylated to form 5-methylcytosine"
tataataattattaagctattgatatgaagcagaacacttcctcaaattaaggtacctttcgctgtaagtagcaaagactgccttcctgcagtaagtaaagaagtgactcttcaaatactgg

SEQ ID NO: 3168 - DNA, 122 bp, Homo sapiens
  misc_feature (61)..(62): /note="This region represents a CpG dinucleotide"
  misc_feature (61)..(61): /note="Nucleotide may be methylated to form 5-methylcytosine"
tcgggtccgtgcttgctgatgtgtggagagcagttggtccacgtgttcactgtagagtgccgtattccgtgatcccgccacagctgctcttccaggcctcttgcctgcagggcgttcatccc

SEQ ID NO: 3169 - DNA, 122 bp, Homo sapiens
  misc_feature (61)..(62): /note="This region represents a CpG dinucleotide"
  misc_feature (61)..(61): /note="Nucleotide may be methylated to form 5-methylcytosine"
ctgtatatgggcacaaagactaccacactctgaatccagcatatgaattctttttaaaggcgttaacaggaattatacacctgtaaacgggacaggcccagtgacacaactgtctgctcatt

SEQ ID NO: 3170 - DNA, 122 bp, Homo sapiens
  misc_feature (61)..(62): /note="This region represents a CpG dinucleotide"
  misc_feature (61)..(61): /note="Nucleotide may be methylated to form 5-methylcytosine"
ctaaaagcacactagcatttttgccttaaataaaccttccataaaaggtgcttggcaggccgggcatggtggctcaagccggtaatcccagcaccttgggaggccgaggcaggtggatcatc

SEQ ID NO: 3171 - DNA, 122 bp, Homo sapiens
  misc_feature (61)..(62): /note="This region represents a CpG dinucleotide"
  misc_feature (61)..(61): /note="Nucleotide may be methylated to form 5-methylcytosine"
aggtggttaagttttggatttttgttccacaagtctgacaaggcacaaaaacacaaaacacgaaaattaaaaagcaatctaataaataaaaatgcaaaaatcatagtctataggctgggcgc

SEQ ID NO: 3172 - DNA, 122 bp, Homo sapiens
  misc_feature (61)..(62): /note="This region represents a CpG dinucleotide"
  misc_feature (61)..(61): /note="Nucleotide may be methylated to form 5-methylcytosine"
acaccatgcatttatttaggccacactaatctcttaacccagtgaagcacaaactacattcgcattcaaattggagcctcactggtttcaaagggcccatcattacttcattctgaagcaat

SEQ ID NO: 3173 - DNA, 122 bp, Homo sapiens
  misc_feature (61)..(62): /note="This region represents a CpG dinucleotide"
  misc_feature (61)..(61): /note="Nucleotide may be methylated to form 5-methylcytosine"
gacagcttttcttgatatgccagaaggtccttaaagtccttatttccataaataccgtcacgatacccctgctcccatcacccagatgaaccgctgttctttgtagtgaaatggtcttaaca

SEQ ID NO: 3174 - DNA, 122 bp, Homo sapiens
  misc_feature (61)..(62): /note="This region represents a CpG dinucleotide"
  misc_feature (61)..(61): /note="Nucleotide may be methylated to form 5-methylcytosine"
ttagtttctgcatccaaaattctgatttgaacatctgactgtgaacaaaacaggcatcatcgctcaatgccaagaaactgaggaaggagactttaagcatgtcactttctcatagaattatt

SEQ ID NO: 3175 - DNA, 122 bp, Homo sapiens
  misc_feature (61)..(62): /note="This region represents a CpG dinucleotide"
  misc_feature (61)..(61): /note="Nucleotide may be methylated to form 5-methylcytosine"
agacaaagggatgattcatgtcctgggcaggatggagcaggacggcatgagattttatcgcgctactcagaacagcgtacattgtaaaacttatgacagccgggcatggtggcatgcgtctg

SEQ ID NO: 3176 - DNA, 122 bp, Homo sapiens
  misc_feature (61)..(62): /note="This region represents a CpG dinucleotide"
  misc_feature (61)..(61): /note="Nucleotide may be methylated to form 5-methylcytosine"
ttcgataactaaaactagcttgatatattacctagctaacttggggcatttgtatttctacgagaagtttctaggaatagcaccctgttttggcatctcaggctgaagaggtatttgtgggc

SEQ ID NO: 3177 - DNA, 122 bp, Homo sapiens
  misc_feature (61)..(62): /note="This region represents a CpG dinucleotide"
  misc_feature (61)..(61): /note="Nucleotide may be methylated to form 5-methylcytosine"
ttgctttgtttgcagcagtaaaactgacggtagagtttccaacacgaaagcccgtgtggtcgcgccgggagctcacggcgttccaagcggcacttatcccgcgttgatgcccaggcaccccg

SEQ ID NO: 3178 - DNA, 122 bp, Homo sapiens
  misc_feature (61)..(62): /note="This region represents a CpG dinucleotide"
  misc_feature (61)..(61): /note="Nucleotide may be methylated to form 5-methylcytosine"
ctctagttgggcaaatctcttaattactctcagcctcagtttcctcatcggtaaaatgtacgtatatctgagaaagagatagttattatcctcattttacagatgacgaatcccaggctcag

SEQ ID NO: 3179 - DNA, 122 bp, Homo sapiens
  misc_feature (61)..(62): /note="This region represents a CpG dinucleotide"
  misc_feature (61)..(61): /note="Nucleotide may be methylated to form 5-methylcytosine"
ggatgtggaaaccacgtggggttcatctcataaagcatctgcataagccgtagggagatacggcaagttccacagagaactcagtgtactggaaagaaagctacacaatgggacctgaaaag

SEQ ID NO: 3180 - DNA, 122 bp, Homo sapiens
  misc_feature (61)..(62): /note="This region represents a CpG dinucleotide"
  misc_feature (61)..(61): /note="Nucleotide may be methylated to form 5-methylcytosine"
agatgaacacaagcttaggggaatcctaaagaagttgatcatgccctacttgttcaatgccgttttaccagcccaaggcagatccaagttgggggagataaaaagctttaaatagtataagt

SEQ ID NO: 3181 - DNA, 122 bp, Homo sapiens
  misc_feature (61)..(62): /note="This region represents a CpG dinucleotide"
  misc_feature (61)..(61): /note="Nucleotide may be methylated to form 5-methylcytosine"
aataaatatttaatgaataaacgaatgtttggctccaccaactctgctgtacacacatatcgcagacttagacaaacagtgtgtcagtgtttatgactgagccataaagatgttaatctagc

SEQ ID NO: 3182 - DNA, 122 bp, Homo sapiens
  misc_feature (61)..(62): /note="This region represents a CpG dinucleotide"
  misc_feature (61)..(61): /note="Nucleotide may be methylated to form 5-methylcytosine"
tttattaaacccacatttcctgccagattttgctttatgtgcctatgtccttttgtttcccggctaacatttccacatctcggaaatcattctttctagtataactgaagaatatggatatt

SEQ ID NO: 3183 - DNA, 122 bp, Homo sapiens
  misc_feature (61)..(62): /note="This region represents a CpG dinucleotide"
  misc_feature (61)..(61): /note="Nucleotide may be methylated to form 5-methylcytosine"
aacagggctaaaaaacgccaattggaaggtctatcacatacgcaatttacaaaacacttccgtgtgctatgaatcaggtgttgtgtaacacggcaaatttatgctaactggtgacttgcatg

SEQ ID NO: 3184 - DNA, 122 bp, Homo sapiens
  misc_feature (61)..(62): /note="This region represents a CpG dinucleotide"
  misc_feature (61)..(61): /note="Nucleotide may be methylated to form 5-methylcytosine"
ggagccaggcttatgtgtgaccaagcttcttagcagagcatttgggcaaggcctttacaccgcatgggagtctggagttttcagtaacttgccacacaggaaggccacacagctggtaggca

SEQ ID NO: 3185 - DNA, 122 bp, Homo sapiens
  misc_feature (61)..(62): /note="This region represents a CpG dinucleotide"
  misc_feature (61)..(61): /note="Nucleotide may be methylated to form 5-methylcytosine"
tgtgcagagccctggctgtaaacgcgcttccctctcaggtgtgcacctgctctccccgtgcggctcatcagctctgctgcacaggcacagaaatgtgttctgcagctacaacctgccccacc

SEQ ID NO: 3186 - DNA, 122 bp, Homo sapiens
  misc_feature (61)..(62): /note="This region represents a CpG dinucleotide"
  misc_feature (61)..(61): /note="Nucleotide may be methylated to form 5-methylcytosine"
ggttttaaaaaatagtatattccttaagcaattttgaaatgctggattgactttttaatacgtactattttttaatgtctattaggatggtaaagtgattttcccagctcccacaccgaaaa

SEQ ID NO: 3187 - DNA, 122 bp, Homo sapiens
  misc_feature (61)..(62): /note="This region represents a CpG dinucleotide"
  misc_feature (61)..(61): /note="Nucleotide may be methylated to form 5-methylcytosine"
cactgggagccaaaaatgttacaggacttttttagttcagctaaagacagggtccttgtccgtcccatagctatgaaaacttagtctcatagacagtttgaagggtgagtaagacagggttt

SEQ ID NO: 3188 - DNA, 122 bp, Homo sapiens
  misc_feature (61)..(62): /note="This region represents a CpG dinucleotide"
  misc_feature (61)..(61): /note="Nucleotide may be methylated to form 5-methylcytosine"
actaacagctctataaaacttgcttccagaggcaccactcagcccccaggtcagcttttccggacactgttattcatctggctagaaaggctttcagctgtgactattgccaaaggccctcc

SEQ ID NO: 3189 - DNA, 122 bp, Homo sapiens
  misc_feature (61)..(62): /note="This region represents a CpG dinucleotide"
  misc_feature (61)..(61): /note="Nucleotide may be methylated to form 5-methylcytosine"
ctggcattcaaggcctgtcatcattttcaacacagcctgaggattcctgccttaactttccgtgctccctactttacccccatgttccagagacgctagatatatcactccttaaatgcatc

SEQ ID NO: 3190 - DNA, 122 bp, Homo sapiens
  misc_feature (61)..(62): /note="This region represents a CpG dinucleotide"
  misc_feature (61)..(61): /note="Nucleotide may be methylated to form 5-methylcytosine"
ttgaatcccaaatgttccttataaatggctcttccatttctcaagcagattaagtacatgcgctgcagtaattcaagtcttagaacttattaaagtgagataatatgaagctcctttgtcat

SEQ ID NO: 3191 - DNA, 122 bp, Homo sapiens
  misc_feature (61)..(62): /note="This region represents a CpG dinucleotide"
  misc_feature (61)..(61): /note="Nucleotide may be methylated to form 5-methylcytosine"
ctgccaattgaattgcccaaatgaaatacacaatcgactgaatgctgctggtgctgctgtcgtcgtggctgtcattgttttacatagcttttttttttttctttttggggacggagtcttgc

SEQ ID NO: 3192 - DNA, 122 bp, Homo sapiens
  misc_feature (61)..(62): /note="This region represents a CpG dinucleotide"
  misc_feature (61)..(61): /note="Nucleotide may be methylated to form 5-methylcytosine"
gattaactactatggaaactatctcccttactcccattgtgaacgagacacaatatatgacgtaaccttcagtcactggacaacaggcagcattaactatgatccctgagagaaggcaacaa

SEQ ID NO: 3193 - DNA, 122 bp, Homo sapiens
  misc_feature (61)..(62): /note="This region represents a CpG dinucleotide"
  misc_feature (61)..(61): /note="Nucleotide may be methylated to form 5-methylcytosine"
cctattagagcacatttaattaaaaatgcattaaaccttcaagcttctaaacacaccctgcgcttcttcaaagccgcccctccgttaaagtcttccccactattaactatgagtcagcctgt

SEQ ID NO: 3194 - DNA, 122 bp, Homo sapiens
  misc_feature (61)..(62): /note="This region represents a CpG dinucleotide"
  misc_feature (61)..(61): /note="Nucleotide may be methylated to form 5-methylcytosine"
tatttgacccctagctctcccttggaaataccaagcctggaactctggagaaggcgccgccgctcgtgtagttctgaaaggctctctttgtcctgaggaatgcctgttgcaatgaagcttgg

SEQ ID NO: 3195 - DNA, 122 bp, Homo sapiens
  misc_feature (61)..(62): /note="This region represents a CpG dinucleotide"
  misc_feature (61)..(61): /note="Nucleotide may be methylated to form 5-methylcytosine"
atcatggagggagggaagtagattgaccctcctggctccagagtacggaactcagacaaacggtcagaagcttacagggaggccaattttggatcaactttaagaagaattttttaaaagct

SEQ ID NO: 3196 - DNA, 122 bp, Homo sapiens
  misc_feature (61)..(62): /note="This region represents a CpG dinucleotide"
  misc_feature (61)..(61): /note="Nucleotide may be methylated to form 5-methylcytosine"
taagggtccacttggttaaacatttgcatgacaactcgccataagtattttgcaggtacccggctggagtttctaaaggtggagctttatgttgcacagctgctgggttttagccaacctag

SEQ ID NO: 3197 - DNA, 122 bp, Homo sapiens
  misc_feature (61)..(62): /note="This region represents a CpG dinucleotide"
  misc_feature (61)..(61): /note="Nucleotide may be methylated to form 5-methylcytosine"
ggagccggggtcctggcagaagcgtagtgccagccgcaatagggcggccgtgggtgcaaacggaggggagcgccggcagctagcaccgcgcggcgactaacgggccgccccggagactcctg

SEQ ID NO: 3198 - DNA, 122 bp, Homo sapiens
  misc_feature (61)..(62): /note="This region represents a CpG dinucleotide"
  misc_feature (61)..(61): /note="Nucleotide may be methylated to form 5-methylcytosine"
ttctgagcagatagtataaattgtaaaagtactgagaatgaaggagacattctgtgattccggtggtgacatttcagtgaacattcttgcagatacatatgcacagatgcctagagaagtat

SEQ ID NO: 3199 - DNA, 122 bp, Homo sapiens
  misc_feature (61)..(62): /note="This region represents a CpG dinucleotide"
  misc_feature (61)..(61): /note="Nucleotide may be methylated to form 5-methylcytosine"
cactttcacttagaataatggcctccagctccatgcaagttgctgcaaaagacttcatttcgttcctttttatggctgagtagtattctatcgtgtatatcaactacattttctttatccac

SEQ ID NO: 3200 - DNA, 122 bp, Homo sapiens
  misc_feature (61)..(62): /note="This region represents a CpG dinucleotide"
  misc_feature (61)..(61): /note="Nucleotide may be methylated to form 5-methylcytosine"
cttaaaccttcccaatgataaggagccccagagtcccaccatacctgcagaatcagccttcgaagggaagggggcgtggagtctattttcaacaggcatccttagctgactcttaacagcaa

SEQ ID NO: 3201 - DNA, 122 bp, Homo sapiens
  misc_feature (61)..(62): /note="This region represents a CpG dinucleotide"
  misc_feature (61)..(61): /note="Nucleotide may be methylated to form 5-methylcytosine"
gaggtgttacagctccatgactgctcctgcagatataacaactcagggcagtttttcagtcgtatttatacctacttttaattacatgtagattaaggcagagtttatgcagtaatttctag

SEQ ID NO: 3202 - DNA, 122 bp, Homo sapiens
  misc_feature (61)..(62): /note="This region represents a CpG dinucleotide"
  misc_feature (61)..(61): /note="Nucleotide may be methylated to form 5-methylcytosine"
aaacacgcatgcaggcgcgcacccacccacgctgacacgctcattcacttactctgcccacggactttatgctatcaatagatgctcacggatgctatttctggcccggctttctggatttc

SEQ ID NO: 3203 - DNA, 122 bp, Homo sapiens
  misc_feature (61)..(62): /note="This region represents a CpG dinucleotide"
  misc_feature (61)..(61): /note="Nucleotide may be methylated to form 5-methylcytosine"
ctctgcttttctacattcctgattacaatctgtcttttcagtactccaatcaagtgtcatcgcccttcataaagcctctttgctttctctagaccacattgatcctttttcactcttaactc

SEQ ID NO: 3204 - DNA, 122 bp, Homo sapiens
  misc_feature (61)..(62): /note="This region represents a CpG dinucleotide"
  misc_feature (61)..(61): /note="Nucleotide may be methylated to form 5-methylcytosine"
taaagaaggctccagctgcaataaaaatggactgcctacccctacacacgtcaacatggacggatctcaaagagaatgtggaagaagcagacagaccagagctgggaaaatgcaagtccatt

SEQ ID NO: 3205 - DNA, 122 bp, Homo sapiens
  misc_feature (61)..(62): /note="This region represents a CpG dinucleotide"
  misc_feature (61)..(61): /note="Nucleotide may be methylated to form 5-methylcytosine"
ggaagaaactcataagcaaaggactggagaaaaagtagaaaggaattattaaaacatcaacgaagttaaaagactataggttttggagtcagaaacccagacttgtaacacaaacttactta

SEQ ID NO: 3206 - DNA, 122 bp, Homo sapiens
  misc_feature (61)..(62): /note="This region represents a CpG dinucleotide"
  misc_feature (61)..(61): /note="Nucleotide may be methylated to form 5-methylcytosine"
caaaacgggtttaagatgaagacaagctgggagacagggagactagttgagtagttactgcggtaatctagggcaaagatgatggagagctaactaaagcagaaatagtaacaatacagcta

SEQ ID NO: 3207 - DNA, 122 bp, Homo sapiens
  misc_feature (61)..(62): /note="This region represents a CpG dinucleotide"
  misc_feature (61)..(61): /note="Nucleotide may be methylated to form 5-methylcytosine"
acaccaagcagctcatgcgttccagaggtttcaggactgaacgttggttctgtggttccccgtttggcatctggctttcattaggccataaaaaacagtttacggcccttctggttggaaca

SEQ ID NO: 3208 - DNA, 122 bp, Homo sapiens
  misc_feature (61)..(62): /note="This region represents a CpG dinucleotide"
  misc_feature (61)..(61): /note="Nucleotide may be methylated to form 5-methylcytosine"
ttttcagaatacagtagtccctccacatttgtgggtttcacatctgcaaattcaaacaaccgcagatcaaaactagtgtaaaaaaaatggcaataaaacaataaaagtaatagaaataaaaa

SEQ ID NO: 3209 - DNA, 122 bp, Homo sapiens
  misc_feature (61)..(62): /note="This region represents a CpG dinucleotide"
  misc_feature (61)..(61): /note="Nucleotide may be methylated to form 5-methylcytosine"
acaaacagggcgggggcgcggaggtttggggtgggggccgcagggggctggaaggaagtgcgcagtgtggcgagagcgcgaacaaagccctctccggagccccgtcacccctcggtgacccc

SEQ ID NO: 3210 - DNA, 122 bp, Homo sapiens
  misc_feature (61)..(62): /note="This region represents a CpG dinucleotide"
  misc_feature (61)..(61): /note="Nucleotide may be methylated to form 5-methylcytosine"
ggaagaggatccttctgtttactcaatcactcaacaaaaatttatcgtcagctaactgcccggaacatcagaggtgagtaagacaggtccctgcccttatgtcctttagagtccctggggaa

SEQ ID NO: 3211 - DNA, 122 bp, Homo sapiens
  misc_feature (61)..(62): /note="This region represents a CpG dinucleotide"
  misc_feature (61)..(61): /note="Nucleotide may be methylated to form 5-methylcytosine"
tcgtggcgtcctcactagccacttcctaggggcagacagtagtgcagtgttccacggtagcgtactacataaaccatccatctccatcacagcccgtcacactcctgtccaagaaatgttgc

SEQ ID NO: 3212 - DNA, 122 bp, Homo sapiens
  misc_feature (61)..(62): /note="This region represents a CpG dinucleotide"
  misc_feature (61)..(61): /note="Nucleotide may be methylated to form 5-methylcytosine"
aaaactgaaggagagggagcacttcctaactcatttcatgaggcaggattaccctggtaccgaagtcagacaaagacactacaagaaaagtaaaccatagactaacatcacttatgaatata

SEQ ID NO: 3213 - DNA, 122 bp, Homo sapiens
  misc_feature (61)..(62): /note="This region represents a CpG dinucleotide"
  misc_feature (61)..(61): /note="Nucleotide may be methylated to form 5-methylcytosine"
ttaaagaaaacaaactccaagcaacagcttttctttctctccttcccttgtgaggtccgccggcaaaccaccaatgtttccgtattcaaggccaaaataccctagggagggaccggactcct

SEQ ID NO: 3214 - DNA, 122 bp, Homo sapiens
  misc_feature (61)..(62): /note="This region represents a CpG dinucleotide"
  misc_feature (61)..(61): /note="Nucleotide may be methylated to form 5-methylcytosine"
acttgggcagagaggagctctgggaaaatctagttgtcaacacgtatcaccctgatagggcgttatttaaagtatccatttattagcaagttcacttttgtttgcttgttttgtttttaaaa

SEQ ID NO: 3215 - DNA, 122 bp, Homo sapiens
  misc_feature (61)..(62): /note="This region represents a CpG dinucleotide"
  misc_feature (61)..(61): /note="Nucleotide may be methylated to form 5-methylcytosine"
ctgtgcatcatagcatccatccagctcttgccccaagccgtctcctgttatagtgaactacgtacacaagtgtctgtcagctcatctgtttggggtaggaaccccgacttgtacctagagta

SEQ ID NO: 3216 - DNA, 122 bp, Homo sapiens
  misc_feature (61)..(62): /note="This region represents a CpG dinucleotide"
  misc_feature (61)..(61): /note="Nucleotide may be methylated to form 5-methylcytosine"
agggactagcacagacctgcacagcacaggcagtccaaaatccttctggaatataaacagcgtgagaaggagggagcttttcccgtcaagtggccaaggcacaccagcatggagaagcctgg

SEQ ID NO: 3217 - DNA, 122 bp, Homo sapiens
  misc_feature (61)..(62): /note="This region represents a CpG dinucleotide"
  misc_feature (61)..(61): /note="Nucleotide may be methylated to form 5-methylcytosine"
cgcttcattttaaacatgttggccaacacaaaatgattcattgatgtcagttacaagtagcgcagaataatagcatcactcctagacgttgtgtcagggctgtgatatgaagcattctaaaa

SEQ ID NO: 3218 - DNA, 122 bp, Homo sapiens
  misc_feature (61)..(62): /note="This region represents a CpG dinucleotide"
  misc_feature (61)..(61): /note="Nucleotide may be methylated to form 5-methylcytosine"
aagcattatggaattaacaaaaccaaccttgctgagcttaactatggaatggaagtatgacgaaaggccgtgtagtagggagcagtccacctaggtataggcaataaagggactactgtctg

SEQ ID NO: 3219 - DNA, 122 bp, Homo sapiens
  misc_feature (61)..(62): /note="This region represents a CpG dinucleotide"
  misc_feature (61)..(61): /note="Nucleotide may be methylated to form 5-methylcytosine"
gttttaatgtagatttttttttgcacccatgctgtttattgctaaatgtaatagtctgatcgtgacactgaaaaaaatatatatttgtgttctgagtaatggaaaaataagggaccaaggaa

SEQ ID NO: 3220 - DNA, 122 bp, Homo sapiens
  misc_feature (61)..(62): /note="This region represents a CpG dinucleotide"
  misc_feature (61)..(61): /note="Nucleotide may be methylated to form 5-methylcytosine"
tagacctttgcttttggccttctctgggactggaattcctaaccgtatgagtaaaatcctcgtgtcctgcctggcacacagtgctagtgagctctaccattgtactgcctccagcatcataa

SEQ ID NO: 3221 - DNA, 122 bp, Homo sapiens
  misc_feature (61)..(62): /note="This region represents a CpG dinucleotide"
  misc_feature (61)..(61): /note="Nucleotide may be methylated to form 5-methylcytosine"
gataacgatagtctccacctcatagaactgtgaggataaaacgatcgtgcccatgaagcacgcagcacagtgccagcgcacaagggctcacgagttgctgttactaacaagccctggaaaaa

SEQ ID NO: 3222 - DNA, 122 bp, Homo sapiens
  misc_feature (61)..(62): /note="This region represents a CpG dinucleotide"
  misc_feature (61)..(61): /note="Nucleotide may be methylated to form 5-methylcytosine"
cttaaaccagaaagtggcactcgttttagtgccaagcacatttgcttccagattctttcacgctgaatcttctatggagggagtaggaatggcagaggagtcataaggggacaattctcaga

SEQ ID NO: 3223 - DNA, 122 bp, Homo sapiens
  misc_feature (61)..(62): /note="This region represents a CpG dinucleotide"
  misc_feature (61)..(61): /note="Nucleotide may be methylated to form 5-methylcytosine"
attttccattaggaatgtaaatgacaacatctttaaaagtcataaacccttactcagccacgacatggttataaattgtagaaagaacaatggagtgggagttagaaaatttggcttcaagt

SEQ ID NO: 3224 - DNA, 122 bp, Homo sapiens
  misc_feature (61)..(62): /note="This region represents a CpG dinucleotide"
  misc_feature (61)..(61): /note="Nucleotide may be methylated to form 5-methylcytosine"
aggcttaccttcttgaaatagtcagcaaggctgtcggggtcccagcccaggacctctgagcgaaagggcacattcctcagtgccatggctgctctcccgggaagaagctcacaagctgagca

SEQ ID NO: 3225 - DNA, 122 bp, Homo sapiens
  misc_feature (61)..(62): /note="This region represents a CpG dinucleotide"
  misc_feature (61)..(61): /note="Nucleotide may be methylated to form 5-methylcytosine"
ataattaacttttacaaagtgcattttaaagatgaagataataaagcacaaagatgctaacggaagatagcaagtaagggatgaaactaagatttgaagccgcacagcctgactgcagagcc

SEQ ID NO: 3226 - DNA, 122 bp, Homo sapiens
  misc_feature (61)..(62): /note="This region represents a CpG dinucleotide"
  misc_feature (61)..(61): /note="Nucleotide may be methylated to form 5-methylcytosine"
tgcttgtgacattcccttgtaccaggccctccacaaagagctgggatttgaattctttgacgaagctcagcagagactcaagggaaaggccgtccatcaaagcctggtacttgtcaatcata

SEQ ID NO: 3227 - DNA, 122 bp, Homo sapiens
  misc_feature (61)..(62): /note="This region represents a CpG dinucleotide"
  misc_feature (61)..(61): /note="Nucleotide may be methylated to form 5-methylcytosine"
tcaaacaccagggtttgcgtgattttatctttaccccgcaacagcaacagaagccggtggcgcctgtaaacgagtgaaggtcacctgtatatttgtaaatacttcctgccggttcagcctgt

SEQ ID NO: 3228 - DNA, 122 bp, Homo sapiens
  misc_feature (61)..(62): /note="This region represents a CpG dinucleotide"
  misc_feature (61)..(61): /note="Nucleotide may be methylated to form 5-methylcytosine"
atcaagataatgagaggaacaatttgacaaggaatgcaggttgccatagggaaccaagagcggctcctgactgacagccagcaaggaaatggagacctcagccacacagccgcaaggagttg

SEQ ID NO: 3229 - DNA, 122 bp, Homo sapiens
  misc_feature (61)..(62): /note="This region represents a CpG dinucleotide"
  misc_feature (61)..(61): /note="Nucleotide may be methylated to form 5-methylcytosine"
gcctttaccaagactgctctcttccactgtgcactttctcaggccatatgctgcagtaaacgagactgcatgtctgagctgtataggaaaagggcaattaaatctggttttgcatttctgta

SEQ ID NO: 3230 - DNA, 122 bp, Homo sapiens
  misc_feature (61)..(62): /note="This region represents a CpG dinucleotide"
  misc_feature (61)..(61): /note="Nucleotide may be methylated to form 5-methylcytosine"
acaggcgcctgccactacgcccggctaatttttgtattttattttattttttagtagacacggggttttgggtgttgaccaggtctcgaactcctgacctcaagtgatctgcctgcctcagc

SEQ ID NO: 3231 - DNA, 122 bp, Homo sapiens
  misc_feature (61)..(62): /note="This region represents a CpG dinucleotide"
  misc_feature (61)..(61): /note="Nucleotide may be methylated to form 5-methylcytosine"
aggttagcattcatttccacaggcatccatataggcctatggctagaacacctgtgtcttcggtcagtggtgtcaattgtgaccatctcattattatgaaagcatgtgtcacctatgccttt

SEQ ID NO: 3232 - DNA, 122 bp, Homo sapiens
  misc_feature (61)..(62): /note="This region represents a CpG dinucleotide"
  misc_feature (61)..(61): /note="Nucleotide may be methylated to form 5-methylcytosine"
actagtgtaacatataaaataaaatactgcctgactttcattgttgttgttaaaagataacgtaacattgagcaggccttcagtaatgttaagtatttgaattaggccttgatttgtattct

SEQ ID NO: 3233 - DNA, 122 bp, Homo sapiens
  misc_feature (61)..(62): /note="This region represents a CpG dinucleotide"
  misc_feature (61)..(61): /note="Nucleotide may be methylated to form 5-methylcytosine"
atccagatatggttcagctctatcacagactaaatgccctttgttcacccgaatttaatacgattaatagaaacctgtctggaattaagcaaggcaattgtaacatcaggcttgccttcagc

SEQ ID NO: 3234 - DNA, 122 bp, Homo sapiens
  misc_feature (61)..(62): /note="This region represents a CpG dinucleotide"
  misc_feature (61)..(61): /note="Nucleotide may be methylated to form 5-methylcytosine"
gtgatggttagataatgaaacaagggctttgggatgtaagcagagatactaacagagagccgcatttgtttgtagcacttttaactactcaaggaatcttgaggtgacttaatttgtagttc

SEQ ID NO: 3235 - DNA, 122 bp, Homo sapiens
  misc_feature (61)..(62): /note="This region represents a CpG dinucleotide"
  misc_feature (61)..(61): /note="Nucleotide may be methylated to form 5-methylcytosine"
ctgttttacactacttccctgtgcatatttctgtcatttgagattctataatggtaaaaacgctacaaaatttttgtcaaagccgaaagaggcacaatggtggaaaactgtcaattcattat

SEQ ID NO: 3236 - DNA, 122 bp, Homo sapiens
  misc_feature (61)..(62): /note="This region represents a CpG dinucleotide"
  misc_feature (61)..(61): /note="Nucleotide may be methylated to form 5-methylcytosine"
ctttgaggatcagagaagaccaatgtcccaactcaaacagcgaggcaagcaaagttccctcgtagcctttttgtccccattcatgtcttcggttgattggttgagagctactgtacttagtt

SEQ ID NO: 3237 - DNA, 122 bp, Homo sapiens
  misc_feature (61)..(62): /note="This region represents a CpG dinucleotide"
  misc_feature (61)..(61): /note="Nucleotide may be methylated to form 5-methylcytosine"
aaaaagtctaatttgtttctggtggaaattcaaaacatacctgttttcctactttgcaaacgtttttccgtcagttaagtttccaacctggagaactctagtcccctaacatctcaactttt

SEQ ID NO: 3238 - DNA, 122 bp, Homo sapiens
  misc_feature (61)..(62): /note="This region represents a CpG dinucleotide"
  misc_feature (61)..(61): /note="Nucleotide may be methylated to form 5-methylcytosine"
agccagggcgaaacctcagcgccgagcccagctgctccaccggctctacactggcaggcacgctgcaaacaggaaaccttgtgattagcacaatgaagccccaccgagcgccagcacaaaca

SEQ ID NO: 3239 - DNA, 122 bp, Homo sapiens
  misc_feature (61)..(62): /note="This region represents a CpG dinucleotide"
  misc_feature (61)..(61): /note="Nucleotide may be methylated to form 5-methylcytosine"
ttctttttggttctttcttagaatttccatctctttgcttatatcgcccatctgttcttgcgtgttgtctactttatccattagatctcttagcatattcatcattgtagttttacattcct

SEQ ID NO: 3240 - DNA, 122 bp, Homo sapiens
  misc_feature (61)..(62): /note="This region represents a CpG dinucleotide"
  misc_feature (61)..(61): /note="Nucleotide may be methylated to form 5-methylcytosine"
ccacggcaatctggggtcgctttgtaaggagctccgacctccgggcagtgcagggatactcgacggcgcgcgatgtcccggcggctccgcgagcctggcgcgctgagagccccagcagtccg

SEQ ID NO: 3241 - DNA, 122 bp, Homo sapiens
  misc_feature (61)..(62): /note="This region represents a CpG dinucleotide"
  misc_feature (61)..(61): /note="Nucleotide may be methylated to form 5-methylcytosine"
tcagtgttctctctgatcttcaatgttccctgtgctggcagctaagatattcagtgagaccgcattacagcccaacttcccttctgcccaatcctgctttccttttttccctttcccatcaa

SEQ ID NO: 3242 - DNA, 122 bp, Homo sapiens
  misc_feature (61)..(62): /note="This region represents a CpG dinucleotide"
  misc_feature (61)..(61): /note="Nucleotide may be methylated to form 5-methylcytosine"
gactttatctgcataataagatgatctttgtttatagtacagttcctccccttgccctaccgtagttcaaccatctggcgtttctctgcatctcacactttgtgggatcccccatgcatatg

SEQ ID NO: 3243 - DNA, 122 bp, Homo sapiens
  misc_feature (61)..(62): /note="This region represents a CpG dinucleotide"
  misc_feature (61)..(61): /note="Nucleotide may be methylated to form 5-methylcytosine"
catggtgttctttcctgttgggcccagacatgagctagttaatacttcttttcaacacctcgccccaatcacataagttggaaacaatgaactatttttgttctaattgatttcatatactt

SEQ ID NO: 3244 - DNA, 122 bp, Homo sapiens
  misc_feature (61)..(62): /note="This region represents a CpG dinucleotide"
  misc_feature (61)..(61): /note="Nucleotide may be methylated to form 5-methylcytosine"
attcctatgacgcattactgcagtcacgctgggatctcgaatagtttcccattaggtgaacgcactctaaaacgtcgcccgaagtttggtgtcatactgaagctctcgggagctacctggaa

SEQ ID NO: 3245 - DNA, 122 bp, Homo sapiens
  misc_feature (61)..(62): /note="This region represents a CpG dinucleotide"
  misc_feature (61)..(61): /note="Nucleotide may be methylated to form 5-methylcytosine"
catgatccgcctgcctcggcctcccaaagtgttgggattacaggtgtgagccaccgcacccggcctctgagaaatatttagattgtacgcctcaaatgggcagggactgtgtcttacacttt

SEQ ID NO: 3246 - DNA, 122 bp, Homo sapiens
  misc_feature (61)..(62): /note="This region represents a CpG dinucleotide"
  misc_feature (61)..(61): /note="Nucleotide may be methylated to form 5-methylcytosine"
gcttcttcccaaacaatagaaggtgtggggttttaaggaccaggtgcagggcgagagaagcgtgtttgcatgtgcagggcgggactccagatatgcctaattcataaatatatatgttcata

SEQ ID NO: 3247 - DNA, 122 bp, Homo sapiens
  misc_feature (61)..(62): /note="This region represents a CpG dinucleotide"
  misc_feature (61)..(61): /note="Nucleotide may be methylated to form 5-methylcytosine"
gttgccctcctatttccaacctcatccctacctccactgccacaatcccttccagccaagcgtgtctgagccattcctgttgacaggtacagacacagtgactatgacgtgctaacagagga

SEQ ID NO: 3248 - DNA, 122 bp, Homo sapiens
  misc_feature (61)..(62): /note="This region represents a CpG dinucleotide"
  misc_feature (61)..(61): /note="Nucleotide may be methylated to form 5-methylcytosine"
aggcatccataatttctaaaggcttccagatagttcccgtgtgcagccgggactgagaaccgtcacctgaaatgaaagactcatagctcatattttttttcccacaaaagatcaacctgaga

SEQ ID NO: 3249 - DNA, 122 bp, Homo sapiens
  misc_feature (61)..(62): /note="This region represents a CpG dinucleotide"
  misc_feature (61)..(61): /note="Nucleotide may be methylated to form 5-methylcytosine"
gttaatgacctgcaagtgatgttctttttgtcttttttctgtactagcattatggatttacgaagacctacgtattcattacaacgagcctgtgaagtaggaaggcagatatcatcttcctc

SEQ ID NO: 3250 - DNA, 122 bp, Homo sapiens
  misc_feature (61)..(62): /note="This region represents a CpG dinucleotide"
  misc_feature (61)..(61): /note="Nucleotide may be methylated to form 5-methylcytosine"
tccaagaagaggaaaagtactactactgactgtgaatcctaaatacatgtaaaatttaaacggcattcatttattctgggcctctgtgcaaagtttcagcgagaaaactccccttacccttt

SEQ ID NO: 3251 - DNA, 122 bp, Homo sapiens
  misc_feature (61)..(62): /note="This region represents a CpG dinucleotide"
  misc_feature (61)..(61): /note="Nucleotide may be methylated to form 5-methylcytosine"
gtcttgctgtaaaaccaggagctagtcctaaactgctcaccagcaagcttgatttatactcgagtagaccatattctcttgctcctccagctgcagctccactcctcatttatcttagccca

SEQ ID NO: 3252 - DNA, 122 bp, Homo sapiens
  misc_feature (61)..(62): /note="This region represents a CpG dinucleotide"
  misc_feature (61)..(61): /note="Nucleotide may be methylated to form 5-methylcytosine"
aaacagatgatgatctgttttgttcactgttgtatccccggtccctagaatagtgcctggcgtgtggttggcactcaatgcatatttatcaaaggaatgaagggctggctcagccatttgat

SEQ ID NO: 3253 - DNA, 122 bp, Homo sapiens
  misc_feature (61)..(62): /note="This region represents a CpG dinucleotide"
  misc_feature (61)..(61): /note="Nucleotide may be methylated to form 5-methylcytosine"
caggtagggagcggtgggaaccttcctgaattccaagttcccagacaccagccaaggagccgaccttggaagcaggcctttccaagggttgtagtttcagtctcctaggcttacacttctct

SEQ ID NO: 3254 - DNA, 122 bp, Homo sapiens
  misc_feature (61)..(62): /note="This region represents a CpG dinucleotide"
  misc_feature (61)..(61): /note="Nucleotide may be methylated to form 5-methylcytosine"
tgttcagctttttgaacaaatcccaaatagagtacacctaaagaaatccatgccaagacacgtcataattatacttttgaaatccaaagacacagaagaaactcttaaaagcagagagagag

SEQ ID NO: 3255 - DNA, 122 bp, Homo sapiens
  misc_feature (61)..(62): /note="This region represents a CpG dinucleotide"
  misc_feature (61)..(61): /note="Nucleotide may be methylated to form 5-methylcytosine"
cgatagttccttattgaggccacatcaaataatgtacttagacatactcctgtggttgcccgttaatctctcgtttgagcggtttaatgctgccagcgtctcaatctttgtaccacattctt

SEQ ID NO: 3256 - DNA, 122 bp, Homo sapiens
  misc_feature (61)..(62): /note="This region represents a CpG dinucleotide"
  misc_feature (61)..(61): /note="Nucleotide may be methylated to form 5-methylcytosine"
ctgctgtacaggttttagcctaggagtctctaccacatcgcctaggtgtatagtaggctacgctatctaggtttgtgtaagtacaccctatgatgttcacacaacaatatcacccagtgaca

SEQ ID NO: 3257 - DNA, 122 bp, Homo sapiens
  misc_feature (61)..(62): /note="This region represents a CpG dinucleotide"
  misc_feature (61)..(61): /note="Nucleotide may be methylated to form 5-methylcytosine"
ggctgggccaggtaccatgggaacagggatgactaggggtgctttgtcagggagatagaccgtaaacaaataccaaactgtgacaatgtcatgcagtgataagtgctaagaaaacaatacag

SEQ ID NO: 3258 - DNA, 122 bp, Homo sapiens
  misc_feature (61)..(62): /note="This region represents a CpG dinucleotide"
  misc_feature (61)..(61): /note="Nucleotide may be methylated to form 5-methylcytosine"
taagagataaaagcaaatttctcctctggaatttatgttttcagcctccgtgcatttggccgccattatctattttcaaaaaatagcattatggatatttgaaagtcaatgctccattaatt

SEQ ID NO: 3259 - DNA, 122 bp, Homo sapiens
  misc_feature (61)..(62): /note="This region represents a CpG dinucleotide"
  misc_feature (61)..(61): /note="Nucleotide may be methylated to form 5-methylcytosine"
cccctcctctttctttctctctttctctcttttgttctttctttctcaatagggctgttgcgcaggctggagtgcagtgtggcacaatcagctcactgcagccttgaactcccaggctcaag

SEQ ID NO: 3260 - DNA, 122 bp, Homo sapiens
  misc_feature (61)..(62): /note="This region represents a CpG dinucleotide"
  misc_feature (61)..(61): /note="Nucleotide may be methylated to form 5-methylcytosine"
ctgaattgaacaagaataaaaaagcacgagcagcagaggcagcaagagccgcagaagcagcgaaagctgcagaagcaactaaggctgctgaggctgctgccaaggctgcaaaagcttcaaac

SEQ ID NO: 3261 - DNA, 122 bp, Homo sapiens
  misc_feature (61)..(62): /note="This region represents a CpG dinucleotide"
  misc_feature (61)..(61): /note="Nucleotide may be methylated to form 5-methylcytosine"
ttggtccatgggaggcaatgggtgggcctgggataagcaccataagttctcactccggtccgtggaactggcagcccagcctccaggcttcaggccatcccaggcttaaaggtagggtttca

SEQ ID NO: 3262 - DNA, 122 bp, Homo sapiens
  misc_feature (61)..(62): /note="This region represents a CpG dinucleotide"
  misc_feature (61)..(61): /note="Nucleotide may be methylated to form 5-methylcytosine"
gatattatgagtccctggcataaggaagtcctgcttagtttatccttttattcttcttatcgttcctctttgagtaatgttttattacgaacttgcagctcttaccccctgtaactgaagca

SEQ ID NO: 3263 - DNA, 122 bp, Homo sapiens
  misc_feature (61)..(62): /note="This region represents a CpG dinucleotide"
  misc_feature (61)..(61): /note="Nucleotide may be methylated to form 5-methylcytosine"
cgtgtgtattgacagagggaacacttgccttctgctccacactcatacatatctggcttacgacagaaacacagttgacaaagtttctgttcttaaagggagtgctttgggcaactgcagat

SEQ ID NO: 3264 - DNA, 122 bp, Homo sapiens
  misc_feature (61)..(62): /note="This region represents a CpG dinucleotide"
  misc_feature (61)..(61): /note="Nucleotide may be methylated to form 5-methylcytosine"
ctctgagctgccgtactagaatccgctcctgctcaacagcctgacaaaaaatccagactccgagtgtaaaacaggaggggtggtgcaaacacaagatgacacacctcggatgcaccaaacct

SEQ ID NO: 3265 - DNA, 122 bp, Homo sapiens
  misc_feature (61)..(62): /note="This region represents a CpG dinucleotide"
  misc_feature (61)..(61): /note="Nucleotide may be methylated to form 5-methylcytosine"
ttaaactagacagaatagattctgttgtctgaaactaagaacattgactgagccaacacccgtctgtcccaaaactgtaagctccttaaagagaagagatttttttatgtctttatctcccc

SEQ ID NO: 3266 - DNA, 122 bp, Homo sapiens
  misc_feature (61)..(62): /note="This region represents a CpG dinucleotide"
  misc_feature (61)..(61): /note="Nucleotide may be methylated to form 5-methylcytosine"
catcttcatctagtgaaagctcctacccacataacattaaatcataaacatatgcagcaacgggcctttgaatacgcctttgcaatgctttgcatggaatgagccataagctatgttatttg

SEQ ID NO: 3267 - DNA, 122 bp, Homo sapiens
  misc_feature (61)..(62): /note="This region represents a CpG dinucleotide"
  misc_feature (61)..(61): /note="Nucleotide may be methylated to form 5-methylcytosine"
tcctccgggaaagggtctccaatcacctctcataaggagacatgtcctgctgcctcactgcggtggcctcaggggtaaggaatcagaacccacccagtgtgaagaataaacctggactctcg

SEQ ID NO: 3268 - DNA, 122 bp, Homo sapiens
  misc_feature (61)..(62): /note="This region represents a CpG dinucleotide"
  misc_feature (61)..(61): /note="Nucleotide may be methylated to form 5-methylcytosine"
ttcaactcaaagatagaaaagagaaattttgtatgtgatgcaaatgagtcatctttgctgcggaggagtgatagcgatggattactctagtgtgccttaagacctaacttctttcaaaccag

SEQ ID NO: 3269 - DNA, 122 bp, Homo sapiens
  misc_feature (61)..(62): /note="This region represents a CpG dinucleotide"
  misc_feature (61)..(61): /note="Nucleotide may be methylated to form 5-methylcytosine"
ctaaattcaacctgcagagcctatttctacctctgactcttcttttatcccctttctccacgtggacatttcatgcaaagtgtgaatgacattaaatcagtttctgcagtattccatgccat

SEQ ID NO: 3270 - DNA, 122 bp, Homo sapiens
  misc_feature (61)..(62): /note="This region represents a CpG dinucleotide"
  misc_feature (61)..(61): /note="Nucleotide may be methylated to form 5-methylcytosine"
gcttcagagcctttcacattttactgggtaaaggagatagggagagaggggagttgttgtcggtcagcagcttgatttacagcagacttgcaagactgcattcttctaacaacaggctctag

SEQ ID NO: 3271 - DNA, 122 bp, Homo sapiens
  misc_feature (61)..(62): /note="This region represents a CpG dinucleotide"
  misc_feature (61)..(61): /note="Nucleotide may be methylated to form 5-methylcytosine"
attactcctgagggagggccagtgcagggcagtgactttggtgttggttagaactggattcgagtcttggctctgccattataaatactgtgaccttaggcaagtcacctgattgttctctt

SEQ ID NO: 3272 - DNA, 122 bp, Homo sapiens
  misc_feature (61)..(62): /note="This region represents a CpG dinucleotide"
  misc_feature (61)..(61): /note="Nucleotide may be methylated to form 5-methylcytosine"
gaagggagatctattacttcagcctctctaacagaagcttgcaaccttgatctgtttgtccgcctgtctgtccagctgtctgtctctgtcccaccactttctaggctgtgattgggtccagg

SEQ ID NO: 3273 - DNA, 122 bp, Homo sapiens
  misc_feature (61)..(62): /note="This region represents a CpG dinucleotide"
  misc_feature (61)..(61): /note="Nucleotide may be methylated to form 5-methylcytosine"
tcagcgcagccgccatcttatgcctgaagcggactgaggtcgagctaggcaaggagaacacggggcacagattgtggagctgactgagaggaggcctgagtcccgccacagccacttcccac

SEQ ID NO: 3274 - DNA, 122 bp, Homo sapiens
  misc_feature (61)..(62): /note="This region represents a CpG dinucleotide"
  misc_feature (61)..(61): /note="Nucleotide may be methylated to form 5-methylcytosine"
ttgttaaaatatatacaagttgcataaaagccagcatgataaatcaatcgtgcctttgcacgcatattcagtccccgttaagacaactaaagacaagtcaaatgacggggtcataaccaaaa

SEQ ID NO: 3275 - DNA, 122 bp, Homo sapiens
  misc_feature (61)..(62): /note="This region represents a CpG dinucleotide"
  misc_feature (61)..(61): /note="Nucleotide may be methylated to form 5-methylcytosine"
gggttgcctcaaaactgaggcagccagctgttgggtcaaagcctgtgcatactgctcttccgataccaaatcttggcactactgggtcacagcactgttcttcaagacctttggaacttact

SEQ ID NO: 3276 - DNA, 122 bp, Homo sapiens
  misc_feature (61)..(62): /note="This region represents a CpG dinucleotide"
  misc_feature (61)..(61): /note="Nucleotide may be methylated to form 5-methylcytosine"
ctgcatcctcattttcttttggataaaatcaagctctatcgtgagacagaatggcttcttcgacctcacttgcctgtagttctctccctgtgtcacctgcattaactcctggctccagcttg

SEQ ID NO: 3277 - DNA, 122 bp, Homo sapiens
  misc_feature (61)..(62): /note="This region represents a CpG dinucleotide"
  misc_feature (61)..(61): /note="Nucleotide may be methylated to form 5-methylcytosine"
ggcacaagccaaggaagaggggaaaggagaaacctgacggacacgtctgcgacaaatccccggggaaaatcccccccaggcacgtccctcaggaagccagtggagaaacgcttctcaggacc

SEQ ID NO: 3278 - DNA, 122 bp, Homo sapiens
  misc_feature (61)..(62): /note="This region represents a CpG dinucleotide"
  misc_feature (61)..(61): /note="Nucleotide may be methylated to form 5-methylcytosine"
ccatatctcaccttacacatctcttcatctgtgtgctttgtaatgtcctttacaataaaccgttaaacgttaagtaggtgtttccttgagttctgtgagccactccagcaaattaattgaaa

SEQ ID NO: 3279 - DNA, 122 bp, Homo sapiens
  misc_feature (61)..(62): /note="This region represents a CpG dinucleotide"
  misc_feature (61)..(61): /note="Nucleotide may be methylated to form 5-methylcytosine"
aacatgggatttgggcggggacaaatatccaactctatcatttacttgactacaacaaagcgtgttgaggattagcagccagctctgacacataggaactagggtcccctgtttgcttctga

SEQ ID NO: 3280 - DNA, 122 bp, Homo sapiens
  misc_feature (61)..(62): /note="This region represents a CpG dinucleotide"
  misc_feature (61)..(61): /note="Nucleotide may be methylated to form 5-methylcytosine"
ccattgtggctcatcattttacaatcccacaaacggtgtacaaggttttcagtttctccacgccctcatcaacacttgttattttctgtttctttgatatgggctatccttatgagtgtgag

SEQ ID NO: 3281 - DNA, 122 bp, Homo sapiens
  misc_feature (61)..(62): /note="This region represents a CpG dinucleotide"
  misc_feature (61)..(61): /note="Nucleotide may be methylated to form 5-methylcytosine"
ccagtatcttgcccacattctcctacttattactcttcaattccatttcagagtctgttacgtgaacataattacccttatccctcttgcacaaatctttctttaatctgttggatgactct

SEQ ID NO: 3282 - DNA, 122 bp, Homo sapiens
  misc_feature (61)..(62): /note="This region represents a CpG dinucleotide"
  misc_feature (61)..(61): /note="Nucleotide may be methylated to form 5-methylcytosine"
gctatgactttacttttaaagctacagtaataagactgacagctgatttctcaaccaatacggtgggaaccaaaaagcaatggaattggtatacctaatgttttgaaagaaaacagctacta

SEQ ID NO: 3283 - DNA, 122 bp, Homo sapiens
  misc_feature (61)..(62): /note="This region represents a CpG dinucleotide"
  misc_feature (61)..(61): /note="Nucleotide may be methylated to form 5-methylcytosine"
taaaaatataaaacgcaatgaagttagaattaaactccagtaactgtgtgtcattgtccacggaagagtgctcaagcactgctcagttaagaaaaggatggactgagaccagccgcgtacac

SEQ ID NO: 3284 - DNA, 122 bp, Homo sapiens
  misc_feature (61)..(62): /note="This region represents a CpG dinucleotide"
  misc_feature (61)..(61): /note="Nucleotide may be methylated to form 5-methylcytosine"
gggtttgtgtacacagcgtggacgccacgcatccgtcaggtgaatctgaggttcttgtcccggccaaaatctaaaccaggcgcaggtgaggtcccctcaagcgcgtcaaaggggacccggct

SEQ ID NO: 3285 - DNA, 122 bp, Homo sapiens
  misc_feature (61)..(62): /note="This region represents a CpG dinucleotide"
  misc_feature (61)..(61): /note="Nucleotide may be methylated to form 5-methylcytosine"
tgactgacctgattctaattgcagacattgagctgatgttattcttggcgcaggacagagcgattactcagtagtttctgttaaagtgatcctttgttaaacttctgctcccaacccactcc

SEQ ID NO: 3286 - DNA, 122 bp, Homo sapiens
  misc_feature (61)..(62): /note="This region represents a CpG dinucleotide"
  misc_feature (61)..(61): /note="Nucleotide may be methylated to form 5-methylcytosine"
cgtttgctctgaagacatttccttgtcaatctctcccgccacattaaaaatctgtcattacgattgcatcgccgcctggctcctgagatttctgactgctttattgctctcctcattttttt

SEQ ID NO: 3287 - DNA, 122 bp, Homo sapiens
  misc_feature (61)..(62): /note="This region represents a CpG dinucleotide"
  misc_feature (61)..(61): /note="Nucleotide may be methylated to form 5-methylcytosine"
agtttgaaatgatccctatataaatagaacggatcagcataactttgggataaaattagccgacagtttgtggactctccagcatgcgcctgtttgctcggtgctgttctctcgataaatca

SEQ ID NO: 3288 - DNA, 122 bp, Homo sapiens
  misc_feature (61)..(62): /note="This region represents a CpG dinucleotide"
  misc_feature (61)..(61): /note="Nucleotide may be methylated to form 5-methylcytosine"
gactcagacccacagcacagatttgatcaagggcacagctcataaaaatagcaacaatttcgaattctcctatccaacgtttaggaaacaatccaatggcaagaaatgagaggagttcaatg

SEQ ID NO: 3289 - DNA, 122 bp, Homo sapiens
  misc_feature (61)..(62): /note="This region represents a CpG dinucleotide"
  misc_feature (61)..(61): /note="Nucleotide may be methylated to form 5-methylcytosine"
tcttccagcactcagatatccatgaatgtctgcagccacattaaagttttggatcctccccgcctaccccctacctccactgtctcaaatatttattgatatcgcccatttggtgcagctcc

SEQ ID NO: 3290 - DNA, 122 bp, Homo sapiens
  misc_feature (61)..(62): /note="This region represents a CpG dinucleotide"
  misc_feature (61)..(61): /note="Nucleotide may be methylated to form 5-methylcytosine"
agttgtcagttaatacagtgatggtctaagctttgcatctaagcttgtgcccagaggttccgtgcctagaagacaggcaggctggcatgaagcacatggttaaatattctggttccatgtgt

SEQ ID NO: 3291 - DNA, 122 bp, Homo sapiens
  misc_feature (61)..(62): /note="This region represents a CpG dinucleotide"
  misc_feature (61)..(61): /note="Nucleotide may be methylated to form 5-methylcytosine"
cagaggctcgcaaactttgctgcatagtagaaccacctggggcacttcaaaaaatcctgacgctcaggttgcatccagtgcaaattaaaccggaatgtctagggtaaccgtatttttaaaag

SEQ ID NO: 3292 - DNA, 122 bp, Homo sapiens
  misc_feature (61)..(62): /note="This region represents a CpG dinucleotide"
  misc_feature (61)..(61): /note="Nucleotide may be methylated to form 5-methylcytosine"
gcaaacacaatctgcaggtaattaacattattgtttcccattttagggagcagtcatgcacgcagatgatcaaaggttggtttctggacaacataagtaaacaagcctgtttgagataaatt

SEQ ID NO: 3293 - DNA, 122 bp, Homo sapiens
  misc_feature (61)..(62): /note="This region represents a CpG dinucleotide"
  misc_feature (61)..(61): /note="Nucleotide may be methylated to form 5-methylcytosine"
aacttggaagcaaatctgctcctcgttgagccttgagatcccgtctgataccttaactaccgtggtgagacactctgagccagaggtatccaactaagctatacctggactcctgacccaca

SEQ ID NO: 3294 - DNA, 122 bp, Homo sapiens
  misc_feature (61)..(62): /note="This region represents a CpG dinucleotide"
  misc_feature (61)..(61): /note="Nucleotide may be methylated to form 5-methylcytosine"
acctcatcggctcagctcttgccacacagacatacacaggccatctggagctgcacgggacgctgaaaccaccactgagggcaggcgagagccaaatcaagaaccaagggggccggcacagg

SEQ ID NO: 3295 - DNA, 122 bp, Homo sapiens
  misc_feature (61)..(62): /note="This region represents a CpG dinucleotide"
  misc_feature (61)..(61): /note="Nucleotide may be methylated to form 5-methylcytosine"
gagatgaaaaaattactctgccttcagtccagcagatgcactcggctccccagaggtcagcgcaccccaagcccagaggccggctggcctcggcacgtctcactccactatcttccctcctc

SEQ ID NO: 3296 - DNA, 122 bp, Homo sapiens
  misc_feature (61)..(62): /note="This region represents a CpG dinucleotide"
  misc_feature (61)..(61): /note="Nucleotide may be methylated to form 5-methylcytosine"
gagacaagtggatgataatgcacttactcattaaggagctggctgctaggtaagttcctgcggtgccaatatataagtagtaaaatggcactggaacattaatgagtcagaaaaaatgcatt

SEQ ID NO: 3297 - DNA, 122 bp, Homo sapiens
  misc_feature (61)..(62): /note="This region represents a CpG dinucleotide"
  misc_feature (61)..(61): /note="Nucleotide may be methylated to form 5-methylcytosine"
gtggtggctcacatctgtaatctcagcactccctgaactcctgacctcaagtgattctcccgccttggcctcccagaagtcaggagtttgagactagcctgcttagcatgataaaaccctgt

SEQ ID NO: 3298 - DNA, 122 bp, Homo sapiens
  misc_feature (61)..(62): /note="This region represents a CpG dinucleotide"
  misc_feature (61)..(61): /note="Nucleotide may be methylated to form 5-methylcytosine"
gcctgctacaaaagtaattcagacagtagcttagtcccaagccaccgaaccgttcctatgcggggagctgtcactgtcacattcagaaagcgtatgcactgtaataacagcaatggaacaca

SEQ ID NO: 3299 - DNA, 122 bp, Homo sapiens
  misc_feature (61)..(62): /note="This region represents a CpG dinucleotide"
  misc_feature (61)..(61): /note="Nucleotide may be methylated to form 5-methylcytosine"
cttagctctggcttagctagctgtgccccagaagagctgggtcctcagggagtcttcttgcggcccggtttggatgttcctaagcatagaagactctgccagtgtgtccctcattcgtttca

SEQ ID NO: 3300 - DNA, 122 bp, Homo sapiens
  misc_feature (61)..(62): /note="This region represents a CpG dinucleotide"
  misc_feature (61)..(61): /note="Nucleotide may be methylated to form 5-methylcytosine"
agccctgatgagaacctccaggtacttgtagtcagcatctgctgaccctgtacactgaaacgctgtgctctgctcagggagttacctctttaaggaaagctagttgtgtaccagctcattaa

SEQ ID NO: 3301 - DNA, 122 bp, Homo sapiens
  misc_feature (61)..(62): /note="This region represents a CpG dinucleotide"
  misc_feature (61)..(61): /note="Nucleotide may be methylated to form 5-methylcytosine"
cagactttaaagctgagctcgattctgctgactacttattttcagcattcaaagacacatcgtccatataacctactcatcattcaatcaagtatttccttgttcattaacttttcatgtgg

SEQ ID NO: 3302 - DNA, 122 bp, Homo sapiens
  misc_feature (61)..(62): /note="This region represents a CpG dinucleotide"
  misc_feature (61)..(61): /note="Nucleotide may be methylated to form 5-methylcytosine"
aagttgaaaaaaatgttaaaattcccttgcaagagagtttaacaccccagacacaggctgcgacaatgagcaaggaagatggttattcctgtgggataaggctatacattttagtgttccag

SEQ ID NO: 3303 - DNA, 122 bp, Homo sapiens
  misc_feature (61)..(62): /note="This region represents a CpG dinucleotide"
  misc_feature (61)..(61): /note="Nucleotide may be methylated to form 5-methylcytosine"
tagtcatattccttctagcactccactgcaaattgggttaatctcataaactaactcaagcgtacttatgaattaatgacgacagtagcttaatatgctgctgttctcagagaaacaagcaa

SEQ ID NO: 3304 - DNA, 122 bp, Homo sapiens
  misc_feature (61)..(62): /note="This region represents a CpG dinucleotide"
  misc_feature (61)..(61): /note="Nucleotide may be methylated to form 5-methylcytosine"
ttcagcagtttccttagaaccattgccaattgaaagaaccttgttcatcctgagagtcagcggaaaccctgtcattaatgagaggaactggaaagttgccttctatactgtgtaacagaacc

SEQ ID NO: 3305 - DNA, 122 bp, Homo sapiens
  misc_feature (61)..(62): /note="This region represents a CpG dinucleotide"
  misc_feature (61)..(61): /note="Nucleotide may be methylated to form 5-methylcytosine"
atgccttgcattactgcttgcaaacagccatgaccgttgggctttaaagccctgcctccacgctgtctcagctttagacagctgacttcagagccactcatctgctgctcagcagctgggta

SEQ ID NO: 3306 - DNA, 122 bp, Homo sapiens
  misc_feature (61)..(62): /note="This region represents a CpG dinucleotide"
  misc_feature (61)..(61): /note="Nucleotide may be methylated to form 5-methylcytosine"
cgagggaaagcagacgcgtctccgcggcaacccggagcctgcagcccgcagggaccccaccgccccaggtgcaggcgtgtacatgccagttgcagaaaatatcacaccaaaccagtctgagg

SEQ ID NO: 3307 - DNA, 122 bp, Homo sapiens
  misc_feature (61)..(62): /note="This region represents a CpG dinucleotide"
  misc_feature (61)..(61): /note="Nucleotide may be methylated to form 5-methylcytosine"
gaggaactgtgtccctcactctgagacagtgagaacggactgagccggaaagctgatggccgtgagaggagcaggtttgaaaatcactgaatgaagtcatgttgtacagagggggcgggggt

SEQ ID NO: 3308 - DNA, 122 bp, Homo sapiens
  misc_feature (61)..(62): /note="This region represents a CpG dinucleotide"
  misc_feature (61)..(61): /note="Nucleotide may be methylated to form 5-methylcytosine"
aagcaggctttataaagaaggctccagctgcaataaaaatggactgcctacccctacacacgtcaacatggacggatctcaaagagaatgtggaagaagcagacagaccagagctgggaaaa

SEQ ID NO: 3309 - DNA, 122 bp, Homo sapiens
  misc_feature (61)..(62): /note="This region represents a CpG dinucleotide"
  misc_feature (61)..(61): /note="Nucleotide may be methylated to form 5-methylcytosine"
tctccatttccggcaccagcacaaggctgttagtaactggtgctgtcagtggttcttcaccgcacggtcctgactcactcttgtgtcatgaacaatggtgaggcgtgttggagtcatttgct

SEQ ID NO: 3310 - DNA, 122 bp, Homo sapiens
  misc_feature (61)..(62): /note="This region represents a CpG dinucleotide"
  misc_feature (61)..(61): /note="Nucleotide may be methylated to form 5-methylcytosine"
agaaaatctcacagagacccaagagcagctgcacagctgagcttcacagcttctgtaactcgttaattggctcattcatggcccttcctaggcccatgtcatttaagaaactttttattgtg

SEQ ID NO: 3311 - DNA, 122 bp, Homo sapiens
  misc_feature (61)..(62): /note="This region represents a CpG dinucleotide"
  misc_feature (61)..(61): /note="Nucleotide may be methylated to form 5-methylcytosine"
cggcgaggggatgaagccatttcaggttatgcacttgatcccaaagagttttttgtgcttcgctctctaagtgactcataagcagaattcagagaactgttctcattagaatcttgttccct

SEQ ID NO: 3312 - DNA, 122 bp, Homo sapiens
  misc_feature (61)..(62): /note="This region represents a CpG dinucleotide"
  misc_feature (61)..(61): /note="Nucleotide may be methylated to form 5-methylcytosine"
tgaaggtgggtgctgggttccgctttggtggggagacctgttgcctacagcacccacccccgcccgacgcccccgcatgtccgtttatgtcaactctgcctttatcaatgtcttgcctcccg

SEQ ID NO: 3313 - DNA, 122 bp, Homo sapiens
  misc_feature (61)..(62): /note="This region represents a CpG dinucleotide"
  misc_feature (61)..(61): /note="Nucleotide may be methylated to form 5-methylcytosine"
aaattgctttaaaaccaaacagacagtaggaggcatgcatatgccagaaatcatagcccccgtgagagagacaagcccatttttcagcagcagcagctgttggtgcatctgcagacaggttg

SEQ ID NO: 3314 - DNA, 122 bp, Homo sapiens
  misc_feature (61)..(62): /note="This region represents a CpG dinucleotide"
  misc_feature (61)..(61): /note="Nucleotide may be methylated to form 5-methylcytosine"
agtgaggacgtagcctgctctgctgggaggtggctgcagggatgtggggaggatggagggcggggctgcgccagctcatctcgcctccacctgggctgagcctagtaggggtgagagggctc

SEQ ID NO: 3315 - DNA, 122 bp, Homo sapiens
  misc_feature (61)..(62): /note="This region represents a CpG dinucleotide"
  misc_feature (61)..(61): /note="Nucleotide may be methylated to form 5-methylcytosine"
tatttctttatagcagtgtgaaaatggtctaatacacttgtcttgaactcctgcctcaagcgatcctctggaaccttggcctcccagagtgctgggattacaggcatgtgccactacgccct

SEQ ID NO: 3316 - DNA, 122 bp, Homo sapiens
  misc_feature (61)..(62): /note="This region represents a CpG dinucleotide"
  misc_feature (61)..(61): /note="Nucleotide may be methylated to form 5-methylcytosine"
gaagtgaaacgggagagttccctgatttcccctcgtagaatgtgtgacagggatgtggctcgcctgtttcatggccctgccgctcaaaccccaaggaggagcatgcagacaggcaggtgcag

SEQ ID NO: 3317 - DNA, 122 bp, Homo sapiens
  misc_feature (61)..(62): /note="This region represents a CpG dinucleotide"
  misc_feature (61)..(61): /note="Nucleotide may be methylated to form 5-methylcytosine"
cagtcagcgaacaatgctatctgcacgtggtggcgcccaaaatacggctgtcatttatttcgttatatgaaattagagcacgccttgtagccataatgaatcatttccttcctgcctgggcc

SEQ ID NO: 3318 - DNA, 122 bp, Homo sapiens
  misc_feature (61)..(62): /note="This region represents a CpG dinucleotide"
  misc_feature (61)..(61): /note="Nucleotide may be methylated to form 5-methylcytosine"
agaccgagtatacaaatatctctttgaatccttgcttttgcttcttttggatatgtatcccgaagtggagttgctggatcttatagtaattctgtttaatatattgaagagttgccatacag

SEQ ID NO: 3319 - DNA, 122 bp, Homo sapiens
  misc_feature (61)..(62): /note="This region represents a CpG dinucleotide"
  misc_feature (61)..(61): /note="Nucleotide may be methylated to form 5-methylcytosine"
cattttttttctttctgctttttgaaggaaagaaatagtcacgcagacttttcaggaggacgctgtgaagacacaacgaggttttatatgtgtagcaggagacataatcatccgtggaacaa

SEQ ID NO: 3320 - DNA, 122 bp, Homo sapiens
  misc_feature (61)..(62): /note="This region represents a CpG dinucleotide"
  misc_feature (61)..(61): /note="Nucleotide may be methylated to form 5-methylcytosine"
aacttccttgggttgttatgaggattaaatgagttaacattagtaatgctcttggaacagcgtctgacacatcataagcacaaaagtgtttgttagataaaaagtgattttttttcctgcct

SEQ ID NO: 3321 - DNA, 122 bp, Homo sapiens
  misc_feature (61)..(62): /note="This region represents a CpG dinucleotide"
  misc_feature (61)..(61): /note="Nucleotide may be methylated to form 5-methylcytosine"
agtaaaaaaaaaaaaaaaaaaatcagctggatacagtggcctatacctgtcatcccagcacgttgggaggttgaggcaggaggattgcttgaagccaggagttggagaccagcctggacaat

SEQ ID NO: 3322 - DNA, 122 bp, Homo sapiens
  misc_feature (61)..(62): /note="This region represents a CpG dinucleotide"
  misc_feature (61)..(61): /note="Nucleotide may be methylated to form 5-methylcytosine"
tcttggctgaaatgttttatttaccatagttttatatctgtgtggtgttttgtaccggcacgggatatggaacgaaaactgctttgtaatgcagtttgtgacattaatagtattgtaaagtt

SEQ ID NO: 3323 - DNA, 122 bp, Homo sapiens
  misc_feature (61)..(62): /note="This region represents a CpG dinucleotide"
  misc_feature (61)..(61): /note="Nucleotide may be methylated to form 5-methylcytosine"
tgccagctccattacccatgagttattcagccttcagcaagttgcctcatatctctgagtcgcagtttgctcatctgtaaaatgctcattaaatgctttcaaaaatatatcagggaactttt

SEQ ID NO: 3324 - DNA, 122 bp, Homo sapiens
  misc_feature (61)..(62): /note="This region represents a CpG dinucleotide"
  misc_feature (61)..(61): /note="Nucleotide may be methylated to form 5-methylcytosine"
caagtgaatgttaagcttctcttaccagctcttaacaagcgcataagacccacttaataccgtgactagatgggaaataccaaggtgatgacagaggaaactaccttacacataaaactagg

SEQ ID NO: 3325 - DNA, 122 bp, Homo sapiens
  misc_feature (61)..(62): /note="This region represents a CpG dinucleotide"
  misc_feature (61)..(61): /note="Nucleotide may be methylated to form 5-methylcytosine"
gacaggtgaccattctaaaaatggctgggaacttgaggccagcacagtttctgttctgaacgtgtcaagttctcaggcgagtttgtcttaacaagtcccatcaccatgggacttttgttgtc

SEQ ID NO: 3326 - DNA, 122 bp, Homo sapiens
  misc_feature (61)..(62): /note="This region represents a CpG dinucleotide"
  misc_feature (61)..(61): /note="Nucleotide may be methylated to form 5-methylcytosine"
aatcctttcacagagcttatgcaaagagtgcatcgggcaggcctcacacagtttaatctgcgtcttggcactctgcagggcagccgccgtactgaaggcctgtttcagagtcagcattacct

SEQ ID NO: 3327 - DNA, 122 bp, Homo sapiens
  misc_feature (61)..(62): /note="This region represents a CpG dinucleotide"
  misc_feature (61)..(61): /note="Nucleotide may be methylated to form 5-methylcytosine"
atcgtttttgtcccaaatccatccttataaaggtgtacacctgcaggtcaatctttgcatcgcatcccataaattcgtgttggggagggcttggaaagtccaagcttcttgtgtggatggct

SEQ ID NO: 3328 - DNA, 122 bp, Homo sapiens
  misc_feature (61)..(62): /note="This region represents a CpG dinucleotide"
  misc_feature (61)..(61): /note="Nucleotide may be methylated to form 5-methylcytosine"
ttgttaaaattacaacgaatcagattcctgattgcaccaagaatcaaggtggaactgaaacggagagctctcagattgtgtgcaggcaaaggtcatattttagataatttctttaaagtttc

SEQ ID NO: 3329 - DNA, 122 bp, Homo sapiens
  misc_feature (61)..(62): /note="This region represents a CpG dinucleotide"
  misc_feature (61)..(61): /note="Nucleotide may be methylated to form 5-methylcytosine"
aggatttttttgttgtatggatttagtggggttaggattgagatagcgtgtgtgtttgcacgctcgcatgcagaaagatagagaaaaagagagcgcacataagtagttttgctttgaagtcc

SEQ ID NO: 3330 - DNA, 122 bp, Homo sapiens
  misc_feature (61)..(62): /note="This region represents a CpG dinucleotide"
  misc_feature (61)..(61): /note="Nucleotide may be methylated to form 5-methylcytosine"
aatgtagtgccataaatatcaaaacagtgcttggtaatagtccaaaacatttaacttgtccgcaaattcctaaacaaccattggcgtgtaatttggttcttggcagagtgtaactgaataac

SEQ ID NO: 3331 - DNA, 122 bp, Homo sapiens
  misc_feature (61)..(62): /note="This region represents a CpG dinucleotide"
  misc_feature (61)..(61): /note="Nucleotide may be methylated to form 5-methylcytosine"
ctgcttaacctgggcaggttgaaagagtagcaggactcgtcctgtcctgcctttgcatagcgaccaattctggagatgatgatggtatcataaagaagatgatgatagccttttttcccttt

SEQ ID NO: 3332 - DNA, 122 bp, Homo sapiens
  misc_feature (61)..(62): /note="This region represents a CpG dinucleotide"
  misc_feature (61)..(61): /note="Nucleotide may be methylated to form 5-methylcytosine"
tgaatccgggaggcggaggttgcattgggccgaaaccgcgactctgcactccagtctgggcgacagaatgagaccccgtctcaaaaaaaaaatcggcaatcggtgaggcggggattattacc

SEQ ID NO: 3333 - DNA, 122 bp, Homo sapiens
  misc_feature (61)..(62): /note="This region represents a CpG dinucleotide"
  misc_feature (61)..(61): /note="Nucleotide may be methylated to form 5-methylcytosine"
tggccttaccattgcatccacctgctaggctcatgttggacttttgcactaagttgagaccggtggaagaaatttctctaagcgtaccgcctatgctgtgggtcttccaatgggaaggcaag

SEQ ID NO: 3334 - DNA, 122 bp, Homo sapiens
  misc_feature (61)..(62): /note="This region represents a CpG dinucleotide"
  misc_feature (61)..(61): /note="Nucleotide may be methylated to form 5-methylcytosine"
gaacgtgttacaatccctgacctcactgtaaagccagtggacaatgttaaggagctagcacggaactggaaccaggggaagtgctatgacacaggacacatctgctggggaaacccagcggg

SEQ ID NO: 3335 - DNA, 122 bp, Homo sapiens
  misc_feature (61)..(62): /note="This region represents a CpG dinucleotide"
  misc_feature (61)..(61): /note="Nucleotide may be methylated to form 5-methylcytosine"
ttgcggcctctcctcccttctcacccatcctgtggcctcagctctgcacctccctggcagcgctcatcttggaagcctcctgaatgtcatcaaaacactggcttctcctttcccaagggagg

SEQ ID NO: 3336 - DNA, 122 bp, Homo sapiens
  misc_feature (61)..(62): /note="This region represents a CpG dinucleotide"
  misc_feature (61)..(61): /note="Nucleotide may be methylated to form 5-methylcytosine"
agggtatctctttggtccagttaacaaagtcagctttgtcaacatgtgctgcacgagacccgcataccacagtctttcaaaatgccatctttggcaagatacacccattaaaaaacccataa

SEQ ID NO: 3337 - DNA, 122 bp, Homo sapiens
  misc_feature (61)..(62): /note="This region represents a CpG dinucleotide"
  misc_feature (61)..(61): /note="Nucleotide may be methylated to form 5-methylcytosine"
ctctgataggaggaagcccacccacattatagaggacagtctacttcactcaaattctaccgtttttaatgttattttcatctaaaaaacttcatagacacagctaaaataatgctttacca

SEQ ID NO: 3338 - DNA, 122 bp, Homo sapiens
  misc_feature (61)..(62): /note="This region represents a CpG dinucleotide"
  misc_feature (61)..(61): /note="Nucleotide may be methylated to form 5-methylcytosine"
gctataggtttatgaggctgctttggttttaaacagttcattaaactcaaatgggaataacgcaataaatattttccaggttgtacaagacatgcgagggcttgatctagcaaatgagcatg

SEQ ID NO: 3339 - DNA, 122 bp, Homo sapiens
  misc_feature (61)..(62): /note="This region represents a CpG dinucleotide"
  misc_feature (61)..(61): /note="Nucleotide may be methylated to form 5-methylcytosine"
ttctagggctggcagctgttccagacctgtctctttactttcctgaatttaattagtcatcgcttatagttagtgtgaacatttattgtccaagccaggaggcttgaaattgacaagagtca

SEQ ID NO: 3340 - DNA, 122 bp, Homo sapiens
  misc_feature (61)..(62): /note="This region represents a CpG dinucleotide"
  misc_feature (61)..(61): /note="Nucleotide may be methylated to form 5-methylcytosine"
agggacgacagagacagtttctagttagagccttggctccatttttggatgatttagccccgagttcctgagtctattttatgccccttacgtactttgatagaactaaggaaatagtggtt

SEQ ID NO: 3341 - DNA, 122 bp, Homo sapiens
  misc_feature (61)..(62): /note="This region represents a CpG dinucleotide"
  misc_feature (61)..(61): /note="Nucleotide may be methylated to form 5-methylcytosine"
ctcaccagcactggctgtcttctcgaagctcccttggggtagggcaggctaacttatttccgctgtacaaaaggggaaaccctgggtcaggaggtacagaagtgccttcctaagagcatatg

SEQ ID NO: 3342 - DNA, 122 bp, Homo sapiens
  misc_feature (61)..(62): /note="This region represents a CpG dinucleotide"
  misc_feature (61)..(61): /note="Nucleotide may be methylated to form 5-methylcytosine"
cctctgccccctccctaacacacactcacattcacgtacacaataaatcaccctggagtgcgatggaaattccaagaacttcagcattgtcttaacctgtgttctggtgccatcctgagcct

SEQ ID NO: 3343 - DNA, 122 bp, Homo sapiens
  misc_feature (61)..(62): /note="This region represents a CpG dinucleotide"
  misc_feature (61)..(61): /note="Nucleotide may be methylated to form 5-methylcytosine"
agatcattgacattcatttctgaagcaacatcacatttacaggttcacagaatttcagaacgagtggctgtaaggaatgatagagatcatcacgtattcagtccaatgccctcgtttttcac

SEQ ID NO: 3344 - DNA, 122 bp, Homo sapiens
  misc_feature (61)..(62): /note="This region represents a CpG dinucleotide"
  misc_feature (61)..(61): /note="Nucleotide may be methylated to form 5-methylcytosine"
agcaagagaaaacactttctactctgcacaaaaacaggtcttgctgtttttttaaatggccgcaaattttccctctccccacatccgtgtttttttctcgtaactttgtatatcctcccatt

SEQ ID NO: 3345 - DNA, 122 bp, Homo sapiens
  misc_feature (61)..(62): /note="This region represents a CpG dinucleotide"
  misc_feature (61)..(61): /note="Nucleotide may be methylated to form 5-methylcytosine"
acaaaaatgcatacacagaccccaaagcaagatgagcgtttctgtggagcacaaatggaacgctgaatgggtctgaatcaattgctgggctcttatccaaaactaagcagtagcagccagga

SEQ ID NO: 3346 - DNA, 122 bp, Homo sapiens
  misc_feature (61)..(62): /note="This region represents a CpG dinucleotide"
  misc_feature (61)..(61): /note="Nucleotide may be methylated to form 5-methylcytosine"
aaccatggcaaggaagtgagactgcacattgaaatacgcaaaatttgcctttgggtgccacgtgagaaataatcacatcactagaaactaatcataagcttttgtgtttggttaaagtttta

SEQ ID NO: 3347 - DNA, 122 bp, Homo sapiens
  misc_feature (61)..(62): /note="This region represents a CpG dinucleotide"
  misc_feature (61)..(61): /note="Nucleotide may be methylated to form 5-methylcytosine"
agcccagcagcatcatcccggccgccgccgccatttcactctgtcggagacactgaaggccgaggtcgccaccgatcctcctaatcgacggagcaagagaagctggcagatggtcgtccaca

SEQ ID NO: 3348 - DNA, 122 bp, Homo sapiens
  misc_feature (61)..(62): /note="This region represents a CpG dinucleotide"
  misc_feature (61)..(61): /note="Nucleotide may be methylated to form 5-methylcytosine"
cctatttctcacacaggataacagttgagagtcattgccacaataaaacagacatgttagcggtcaggttcatataaggactaagcggccccatgaatcacataggactggctaatcctagg

SEQ ID NO: 3349 - DNA, 122 bp, Homo sapiens
  misc_feature (61)..(62): /note="This region represents a CpG dinucleotide"
  misc_feature (61)..(61): /note="Nucleotide may be methylated to form 5-methylcytosine"
cagactgccagagggcacatgcgtcaccctctcaccccaggacaaaagacactttctaagcggatacagccttctgaataacaggatatgaggggagcaggcggatctggatctactctgtg

SEQ ID NO: 3350 - DNA, 122 bp, Homo sapiens
  misc_feature (61)..(62): /note="This region represents a CpG dinucleotide"
  misc_feature (61)..(61): /note="Nucleotide may be methylated to form 5-methylcytosine"
caaaattcctatgttggtggggccttggagaggtgattaatcataagggttccaccctagcgaatgagccgaatgctcttataaaacagcagaagggaactagctaggcctcttgcccttct

SEQ ID NO: 3351 - DNA, 122 bp, Homo sapiens
  misc_feature (61)..(62): /note="This region represents a CpG dinucleotide"
  misc_feature (61)..(61): /note="Nucleotide may be methylated to form 5-methylcytosine"
cctagtgacacgataaacactcaatcctcacggtgcactaactcatagatgatttattgccgtaagtaactaaacaagagaagagacaggctgtgggtttggtcaagacaatcagcattccc

SEQ ID NO: 3352 - DNA, 122 bp, Homo sapiens
  misc_feature (61)..(62): /note="This region represents a CpG dinucleotide"
  misc_feature (61)..(61): /note="Nucleotide may be methylated to form 5-methylcytosine"
ggcacttctctaagcagcaccatgctgtataaaacaggcatagggctcacatcaggcatacggctcacatcagcacacaatggccacgcggctcacaccaggcgcatggcacgtgacaggca

SEQ ID NO: 3353 - DNA, 122 bp, Homo sapiens
  misc_feature (61)..(62): /note="This region represents a CpG dinucleotide"
  misc_feature (61)..(61): /note="Nucleotide may be methylated to form 5-methylcytosine"
ctgcacatagaggagttcctgttcaccttcctgtcggccccatgtgttcagttatctggacgttccccaaaccctgtcctcctgggtcttttgtggagacttcattggataggcatgattga

SEQ ID NO: 3354 - DNA, 122 bp, Homo sapiens
  misc_feature (61)..(62): /note="This region represents a CpG dinucleotide"
  misc_feature (61)..(61): /note="Nucleotide may be methylated to form 5-methylcytosine"
tgttaaaaaacctaacccctcacaaaattagcaagagaaataagtatatcatgttagaaacggtgcatgatgacatacgcaaaagagacaatacaggactgtgagtaatagcacatgctttg

SEQ ID NO: 3355 - DNA, 122 bp, Homo sapiens
  misc_feature (61)..(62): /note="This region represents a CpG dinucleotide"
  misc_feature (61)..(61): /note="Nucleotide may be methylated to form 5-methylcytosine"
ggatgaggcatgccagcagggtctcgtccaacaatgtaaaagttggctcctgcaaccatccgtgctctgcaatgccactggacctagaataaaagtttcattttaggtaactttgcttttat

SEQ ID NO: 3356 - DNA, 122 bp, Homo sapiens
  misc_feature (61)..(62): /note="This region represents a CpG dinucleotide"
  misc_feature (61)..(61): /note="Nucleotide may be methylated to form 5-methylcytosine"
atgtttgatcagcaattttagtagtgccctactgggaggagtttctctgaacatcagatccgccatgtgttgcttggaggtagcttcgagcaattaagtggattatgcttcataataaattt

SEQ ID NO: 3357 - DNA, 122 bp, Homo sapiens
  misc_feature (61)..(62): /note="This region represents a CpG dinucleotide"
  misc_feature (61)..(61): /note="Nucleotide may be methylated to form 5-methylcytosine"
taaatgattactcctgggtgataggcacaaaccaggactttcccaggcaaaaggaagaagcgctgtacagaatatgtattttcaaagataaatgcacctcgggtcaattctttgaactcaag

SEQ ID NO: 3358 - DNA, 122 bp, Homo sapiens
  misc_feature (61)..(62): /note="This region represents a CpG dinucleotide"
  misc_feature (61)..(61): /note="Nucleotide may be methylated to form 5-methylcytosine"
tctcttcatattaggtatggctcccataccctgtctttggctccagtcatatttaaaccccgcacctaccctcatcatgtaattttagttcatgcatttgtcactactattcccgttttact

SEQ ID NO: 3359 - DNA, 122 bp, Homo sapiens
  misc_feature (61)..(62): /note="This region represents a CpG dinucleotide"
  misc_feature (61)..(61): /note="Nucleotide may be methylated to form 5-methylcytosine"
aattagaataaatgctggatttaccgctccttgaatacgctttctgaaatgatacagccacgcgatacggacactcggagccagacaagaacttctctgtgcagattgtatactctagtccc

SEQ ID NO: 3360 - DNA, 122 bp, Homo sapiens
  misc_feature (61)..(62): /note="This region represents a CpG dinucleotide"
  misc_feature (61)..(61): /note="Nucleotide may be methylated to form 5-methylcytosine"
ctatattataggagcttagaatcccagctgctggctctgggctgaagttctctgatggctcgtgcagggtggactggcctccttcccctatatgtgtgtctactgctgacctgtggctttgc

SEQ ID NO: 3361 - DNA, 122 bp, Homo sapiens
  misc_feature (61)..(62): /note="This region represents a CpG dinucleotide"
  misc_feature (61)..(61): /note="Nucleotide may be methylated to form 5-methylcytosine"
ttttatcagttgacaatttgttttggtcttccttcagatctattgaaaacagctgggcaccgtggctcacacctggaatcccagctgaggcaggaggctcccttgagcccaggagttgaagg

SEQ ID NO: 3362 - DNA, 122 bp, Homo sapiens
  misc_feature (61)..(62): /note="This region represents a CpG dinucleotide"
  misc_feature (61)..(61): /note="Nucleotide may be methylated to form 5-methylcytosine"
tcctggcatcctggtctcctgcactgagctgtggtgagcacatctgggttcctctggatacgtgtgcagggagggggatgcactgggtcgggtcaatgatgagaaccttatattgttctgaa

SEQ ID NO: 3363 - DNA, 122 bp, Homo sapiens
  misc_feature (61)..(62): /note="This region represents a CpG dinucleotide"
  misc_feature (61)..(61): /note="Nucleotide may be methylated to form 5-methylcytosine"
aagcttagtgattatactatgcagaaatgaccccgagaattattccaatttttggacactcggtgtgtgccccacagaccagctgcatgagcatcgcctgggagcttattggaaatacaggt

SEQ ID NO: 3364 - DNA, 122 bp, Homo sapiens
  misc_feature (61)..(62): /note="This region represents a CpG dinucleotide"
  misc_feature (61)..(61): /note="Nucleotide may be methylated to form 5-methylcytosine"
ataaccagtcactctgcacttagtcatgtatctcattgcattgctccatgtttgcctatgcgctcttctttcaaggacaaagaccatgtcttactttatagggcatttctcaccacagctaa

SEQ ID NO: 3365 - DNA, 122 bp, Homo sapiens
  misc_feature (61)..(62): /note="This region represents a CpG dinucleotide"
  misc_feature (61)..(61): /note="Nucleotide may be methylated to form 5-methylcytosine"
cctaattgattcagctcctttacaccgttggctatcattctctttcatatggcttactttcgctaggtaagaacttttccaagatttaagctgcttgatcaaccaaacattataaacctacc

SEQ ID NO: 3366 - DNA, 122 bp, Homo sapiens
  misc_feature (61)..(62): /note="This region represents a CpG dinucleotide"
  misc_feature (61)..(61): /note="Nucleotide may be methylated to form 5-methylcytosine"
ctctgttccaggaaagatttaaaggacgcaagtaagaacgcaagcccgtcaaggctgctccgattttaaatgtcagttcagctcctactttatggggtttggcaaatagagttaagggcctt

SEQ ID NO: 3367 - DNA, 122 bp, Homo sapiens
  misc_feature (61)..(62): /note="This region represents a CpG dinucleotide"
  misc_feature (61)..(61): /note="Nucleotide may be methylated to form 5-methylcytosine"
ataatatggagcttataatgggacataccacaatagttattgcgtggattagtaagtcagcgtatggaagctaggtagaataaagccagtcacagagcaagtgttttttctgttagtattag

SEQ ID NO: 3368 - DNA, 122 bp, Homo sapiens
  misc_feature (61)..(62): /note="This region represents a CpG dinucleotide"
  misc_feature (61)..(61): /note="Nucleotide may be methylated to form 5-methylcytosine"
gaatcatgccaaccataaaactcagcagattattcatcaccatggcaataaaagcaggcacggaagccaattcatagattccattttcaaaccagggggggtgccttgtgggtgtatgtgtg

SEQ ID NO: 3369 - DNA, 122 bp, Homo sapiens
  misc_feature (61)..(62): /note="This region represents a CpG dinucleotide"
  misc_feature (61)..(61): /note="Nucleotide may be methylated to form 5-methylcytosine"
gaagggaatgacaggagctgactcatgccctagcaggacttctctgtctgctgtgttgagcgctggtgatgggggcgtgggaagaagttaggagccattacagaggtcccggtgggccatga

SEQ ID NO: 3370 - DNA, 122 bp, Homo sapiens
  misc_feature (61)..(62): /note="This region represents a CpG dinucleotide"
  misc_feature (61)..(61): /note="Nucleotide may be methylated to form 5-methylcytosine"
ttaattagaaaaaggatttgtgaggctagtcttaagctgcagcgaatctggtgtgctttacgtgtttttctgtattgttccatcataaagaggggtaccttatgatggaacacaggcttagg

SEQ ID NO: 3371 - DNA, 122 bp, Homo sapiens
  misc_feature (61)..(62): /note="This region represents a CpG dinucleotide"
  misc_feature (61)..(61): /note="Nucleotide may be methylated to form 5-methylcytosine"
gtaccaagccctaataggagatttctcaaaggtcagcagctcttccactcagaatcccttcgtggttagcaaaatgtgaaccccaaatatatgagatgggtctcagtcaatttatagtgttt

SEQ ID NO: 3372 - DNA, 122 bp, Homo sapiens
  misc_feature (61)..(62): /note="This region represents a CpG dinucleotide"
  misc_feature (61)..(61): /note="Nucleotide may be methylated to form 5-methylcytosine"
ataaaatctcacctagtctttaaatgtaaacaccgattaagtccacaagcaacagcataacgttctgcagtcattccacatgtatcttcagcacagatgtcaacattttgctgaagaaccat

SEQ ID NO: 3373 - DNA, 122 bp, Homo sapiens
  misc_feature (61)..(62): /note="This region represents a CpG dinucleotide"
  misc_feature (61)..(61): /note="Nucleotide may be methylated to form 5-methylcytosine"
atttcccaacttcagaagtagttgcttaaaatgtatgcaaaagagccagagggtgtcttgcggaacccaagaacaggaagtgcatctagaaatctgaccgcctacgggcacccgggcagctg

SEQ ID NO: 3374 - DNA, 122 bp, Homo sapiens
  misc_feature (61)..(62): /note="This region represents a CpG dinucleotide"
  misc_feature (61)..(61): /note="Nucleotide may be methylated to form 5-methylcytosine"
accttgaatcttccacttcatgaccttcatccaggagtagccactgacatctgtatggtacgttactgttttcacagtattctgtcttttgattctcacatcagttctatgaggtaagtatt

SEQ ID NO: 3375 - DNA, 122 bp, Homo sapiens
  misc_feature (61)..(62): /note="This region represents a CpG dinucleotide"
  misc_feature (61)..(61): /note="Nucleotide may be methylated to form 5-methylcytosine"
ttgtttaggtaactactccagacccccagcgtatagtggggtgcccagtgcaagctacagcggcccagggcccggtatgggtatcagtgccaacaaccagatgcatggacaagggccaagcc

SEQ ID NO: 3376 - DNA, 122 bp, Homo sapiens
  misc_feature (61)..(62): /note="This region represents a CpG dinucleotide"
  misc_feature (61)..(61): /note="Nucleotide may be methylated to form 5-methylcytosine"
tgattatgggccagggatggcatagatttcagatctcatattaattctgagtgacagcatcggctgcctacagagctctgagaaggactcataaagctcattgcgagttaccgagtacaaaa

SEQ ID NO: 3377 - DNA, 122 bp, Homo sapiens
  misc_feature (61)..(62): /note="This region represents a CpG dinucleotide"
  misc_feature (61)..(61): /note="Nucleotide may be methylated to form 5-methylcytosine"
tttacactgcgttaggtattatgagtaatctagagatgatttaaagtgtacaggaggatgcgtgtgggtgatatgcaagtactatgccattttatgtcaaggacttgagcattctcaatttt

SEQ ID NO: 3378 - DNA, 122 bp, Homo sapiens
  misc_feature (61)..(62): /note="This region represents a CpG dinucleotide"
  misc_feature (61)..(61): /note="Nucleotide may be methylated to form 5-methylcytosine"
ccatgaaatttatccatggacctccagtaatgaaccccttatctagcctgatgattttgccgagtaatgggtaaaagaaagtaaagtggatcttagcctccttactctaagaaatggacaaa

SEQ ID NO: 3379 - DNA, 122 bp, Homo sapiens
  misc_feature (61)..(62): /note="This region represents a CpG dinucleotide"
  misc_feature (61)..(61): /note="Nucleotide may be methylated to form 5-methylcytosine"
ttgcggttggccggggagccgaagtgacagaataggcccttgtgcgggtcgcatgggtcgcgctcggtgcacagctcgcccagctgcttggcgcagacgcggcagcagccgcagccgtccag

SEQ ID NO: 3380 - DNA, 122 bp, Homo sapiens
  misc_feature (61)..(62): /note="This region represents a CpG dinucleotide"
  misc_feature (61)..(61): /note="Nucleotide may be methylated to form 5-methylcytosine"
actcaaactataataccctgaaatctattagacccccagtaggctgtatagctcagttggcgctacaactgtgatgaacattttacaagcaaaactaattacacccttttccccacccccat

SEQ ID NO: 3381 - DNA, 122 bp, Homo sapiens
  misc_feature (61)..(62): /note="This region represents a CpG dinucleotide"
  misc_feature (61)..(61): /note="Nucleotide may be methylated to form 5-methylcytosine"
atattatataaaattagcttaaatattcaaacactgtaaaatgagaggcagataggatatcgtctccaaagaggacatggtgaaaacgatactttgaaatgataaatagtcaaatatgggca

SEQ ID NO: 3382 - DNA, 122 bp, Homo sapiens
  misc_feature (61)..(62): /note="This region represents a CpG dinucleotide"
  misc_feature (61)..(61): /note="Nucleotide may be methylated to form 5-methylcytosine"
gctccgggattggcggttgcttggcgggcggtgtcaggctctcggtggcggcggaggcggcggaggccagggaggaagatgtcgtaatgagcggtgggtcccggccgctgccggcggggtct

SEQ ID NO: 3383 - DNA, 122 bp, Homo sapiens
  misc_feature (61)..(62): /note="This region represents a CpG dinucleotide"
  misc_feature (61)..(61): /note="Nucleotide may be methylated to form 5-methylcytosine"
tccgccgagagaaggagttgcttgccagcctccacagtcaggatgtagctgccttgttgccgcagaaacactttttctttgaactgaaaggaaccatagctttttattttctcattctttct

SEQ ID NO: 3384 - DNA, 122 bp, Homo sapiens
  misc_feature (61)..(62): /note="This region represents a CpG dinucleotide"
  misc_feature (61)..(61): /note="Nucleotide may be methylated to form 5-methylcytosine"
acttgtaaactgtccatgaatcacactatacagctcacttctcaggctatccatgtgaagcgcaaagctttctaagccatctagccacaggctctcccctaagaccacttctgtatattcca

SEQ ID NO: 3385 - DNA, 122 bp, Homo sapiens
  misc_feature (61)..(62): /note="This region represents a CpG dinucleotide"
  misc_feature (61)..(61): /note="Nucleotide may be methylated to form 5-methylcytosine"
cctaaccaaggagacctaaacccaggcagccatggagcagagagggagcacaggaatggacgtgggggttaccaccatgacaagccactttgctgtccggaacatcatggaaaaagcagaaa

SEQ ID NO: 3386 - DNA, 122 bp, Homo sapiens
  misc_feature (61)..(62): /note="This region represents a CpG dinucleotide"
  misc_feature (61)..(61): /note="Nucleotide may be methylated to form 5-methylcytosine"
aggctaccactagaccatggtccgcttggcaatgggcatctttccagatgctggcattatcgctagaccaaggagccctctagtggccttctgtgggcataacagaaggctcgcactcttgt

SEQ ID NO: 3387 - DNA, 122 bp, Homo sapiens
  misc_feature (61)..(62): /note="This region represents a CpG dinucleotide"
  misc_feature (61)..(61): /note="Nucleotide may be methylated to form 5-methylcytosine"
cactgttctgaccttgatcaccataaatttttgcctggggacatgtttctttttctccaccgtacacccatgttcatgcagaacagtggagtgggagcagggcagggtctgtatgtgccaaa

SEQ ID NO: 3388 - DNA, 122 bp, Homo sapiens
  misc_feature (61)..(62): /note="This region represents a CpG dinucleotide"
  misc_feature (61)..(61): /note="Nucleotide may be methylated to form 5-methylcytosine"
tttacatgtactcatgcaaaagaagggtgagataatggacttgccccagtgtggaactggcggaacagtgtgtgtgattcttattgtgaaacattcttaaatttgaggctcaaataataaat

SEQ ID NO: 3389 - DNA, 122 bp, Homo sapiens
  misc_feature (61)..(62): /note="This region represents a CpG dinucleotide"
  misc_feature (61)..(61): /note="Nucleotide may be methylated to form 5-methylcytosine"
gaaaactttgaattctgagcctgcaaatgattgctccttgtgactgtaattcccgtgttccgctatgcagtgttgatctgtgcgtcattgcgaatgcattcggaatgtttttctctgaggtc

SEQ ID NO: 3390 - DNA, 122 bp, Homo sapiens
  misc_feature (61)..(62): /note="This region represents a CpG dinucleotide"
  misc_feature (61)..(61): /note="Nucleotide may be methylated to form 5-methylcytosine"
gaacacatcgcttctaacacttcctgacatttcttctaactcctgacattttcagatgcacgggatgttcactgcaacagctgcttccagctgagaaaggggccgccctttctaacgtttta

SEQ ID NO: 3391 - DNA, 122 bp, Homo sapiens
  misc_feature (61)..(62): /note="This region represents a CpG dinucleotide"
  misc_feature (61)..(61): /note="Nucleotide may be methylated to form 5-methylcytosine"
taatcatagactgtttgaggttgatttggtctaagcgagggacaattttgaggattcaaacgacaaaaagaaggcagaagagttatctcttgagactgctctccggagacctgcccttgctt

SEQ ID NO: 3392 - DNA, 122 bp, Homo sapiens
  misc_feature (61)..(62): /note="This region represents a CpG dinucleotide"
  misc_feature (61)..(61): /note="Nucleotide may be methylated to form 5-methylcytosine"
cgcagagaactaacatcattttttccttcagttcagaagaggtggtccaaagtgtttaagcgacagtagttgcaacatgtcagagtgggaatttattatctcagccccaataggtcttaata

SEQ ID NO: 3393 - DNA, 122 bp, Homo sapiens
  misc_feature (61)..(62): /note="This region represents a CpG dinucleotide"
  misc_feature (61)..(61): /note="Nucleotide may be methylated to form 5-methylcytosine"
cagaagatttgacaggtgaacaaacacaagtccagaagggacatgactggcccaagatcacgccaccagctaatgccagacaggcgatgagaaccagttgtctcatacctttgccttgtaaa

SEQ ID NO: 3394 - DNA, 122 bp, Homo sapiens
  misc_feature (61)..(62): /note="This region represents a CpG dinucleotide"
  misc_feature (61)..(61): /note="Nucleotide may be methylated to form 5-methylcytosine"
tgtgtgttttcatacaagctggcacatatctcttctaaagccctgctgtcattgtagctgcgtctttacaaacattttttttttaaatttttataaagtcaaggtctcactatattgcccag

SEQ ID NO: 3395 - DNA, 122 bp, Homo sapiens
  misc_feature (61)..(62): /note="This region represents a CpG dinucleotide"
  misc_feature (61)..(61): /note="Nucleotide may be methylated to form 5-methylcytosine"
tcctctttctgtacagccagtgtaagaacgcagcctgtgggtaagtaccaggaggcctaccgcaacgtgttttatcagcaaggtctttgtgacctgtaccttgtgtcgacctcctatctcat

SEQ ID NO: 3396 - DNA, 122 bp, Homo sapiens
  misc_feature (61)..(62): /note="This region represents a CpG dinucleotide"
  misc_feature (61)..(61): /note="Nucleotide may be methylated to form 5-methylcytosine"
gctcttaactccactgcctatcccaaaacctctaagaactaataatgataatccaccacccgttgctgactctctttttggactcagcccgtctgcacccaggtgaaataaacagccatgtt

SEQ ID NO: 3397 - DNA, 122 bp, Homo sapiens
  misc_feature (61)..(62): /note="This region represents a CpG dinucleotide"
  misc_feature (61)..(61): /note="Nucleotide may be methylated to form 5-methylcytosine"
tcgtcaccaaagtcaagaataccttcttctgcaccacattctcggagattttccaaatcccgggcattttcaggccttcactccctccactaataccccacagcttactcctcccaagtgaa

SEQ ID NO: 3398 - DNA, 122 bp, Homo sapiens
  misc_feature (61)..(62): /note="This region represents a CpG dinucleotide"
  misc_feature (61)..(61): /note="Nucleotide may be methylated to form 5-methylcytosine"
ggctttaaaattgaacttatattaatacattttaaatttaatttggaactagtttagaatcgttgaagctaggactctctgttgactcagaaattgtagaaatgagtggggatggcatttca

SEQ ID NO: 3399 - DNA, 122 bp, Homo sapiens
  misc_feature (61)..(62): /note="This region represents a CpG dinucleotide"
  misc_feature (61)..(61): /note="Nucleotide may be methylated to form 5-methylcytosine"
atatgtgtgcatgtatcattttgatgtcgattccgcatgcagagcagtcgagttgccctacgtgtgccactcacgacagaagcccttttttgcatgtatcattttggtagaatgatttatat

SEQ ID NO: 3400 - DNA, 122 bp, Homo sapiens
  misc_feature (61)..(62): /note="This region represents a CpG dinucleotide"
  misc_feature (61)..(61): /note="Nucleotide may be methylated to form 5-methylcytosine"
tgtgatgaatcatagcgcctgcattgctctggtctaggcattatttgcaacacacagtatcgtaagcgagagattgttctgcctatattcagtgttttccatgcagcaattcttcttgttga

SEQ ID NO: 3401 - DNA, 122 bp, Homo sapiens
  misc_feature (61)..(62): /note="This region represents a CpG dinucleotide"
  misc_feature (61)..(61): /note="Nucleotide may be methylated to form 5-methylcytosine"
ctaggtggaaccacaggcgtgtgccatcatgcctggttaagtttttattttttgtagagacgggatctcattatattgctcaggctagttgctaactcctggactcaggtgatcctcctgcc

SEQ ID NO: 3402 - DNA, 122 bp, Homo sapiens
  misc_feature (61)..(62): /note="This region represents a CpG dinucleotide"
  misc_feature (61)..(61): /note="Nucleotide may be methylated to form 5-methylcytosine"
cttctagtctgctctcagacgctgaatatttgtgtcccaccccaaattcctatattgaagcgcgatggttttaggggatggggccctggaggagtaatgaggtctagaagaggtcacgaggg

SEQ ID NO: 3403 - DNA, 122 bp, Homo sapiens
  misc_feature (61)..(62): /note="This region represents a CpG dinucleotide"
  misc_feature (61)..(61): /note="Nucleotide may be methylated to form 5-methylcytosine"
tttcataatccaaaagaaggaatgaatcacttaactttgggagttttcagtgggtggattcgggaacttgttaaaatgcagatttgctgggataagtgattctgattcacatggctggaatg

SEQ ID NO: 3404 - DNA, 122 bp, Homo sapiens
  misc_feature (61)..(62): /note="This region represents a CpG dinucleotide"
  misc_feature (61)..(61): /note="Nucleotide may be methylated to form 5-methylcytosine"
ttttgtgtgtgtataatgccattctcttcctctgtgaagtgcctgttcggggtgttgctacgtttttgttttgttgtgttttctgttgtagtgtttacatttttcttgtcgattcctaagag

SEQ ID NO: 3405 - DNA, 122 bp, Homo sapiens
  misc_feature (61)..(62): /note="This region represents a CpG dinucleotide"
  misc_feature (61)..(61): /note="Nucleotide may be methylated to form 5-methylcytosine"
ttcaaccaatcctcccaccacagcctcctgagtagctgggactacagatgcgtgtgaccacgcttggctaatgttttgatttttgtgtagagatgggttcccactatgttgcccaggctgag

SEQ ID NO: 3406 - DNA, 122 bp, Homo sapiens
  misc_feature (61)..(62): /note="This region represents a CpG dinucleotide"
  misc_feature (61)..(61): /note="Nucleotide may be methylated to form 5-methylcytosine"
atactccttttaatcttgtccagcccattagcagagcaggcatctctgtgggccttgagacgtagtcccgtaaaactcatcccgtttctacttgatttgctttctttgagaactcttgttta

SEQ ID NO: 3407 - DNA, 122 bp, Homo sapiens
  misc_feature (61)..(62): /note="This region represents a CpG dinucleotide"
  misc_feature (61)..(61): /note="Nucleotide may be methylated to form 5-methylcytosine"
cctgatccccaaactcagaattcacggctccagcatccctcttgccagcaccacttgttacgtatgcctattctgatactgatcatattggtgtgtggctattcagtcctgtctcttctcat

SEQ ID NO: 3408 - DNA, 122 bp, Homo sapiens
  misc_feature (61)..(62): /note="This region represents a CpG dinucleotide"
  misc_feature (61)..(61): /note="Nucleotide may be methylated to form 5-methylcytosine"
ctcatgccactgtcaatccgtggctgcattagtcccaggcttattctctgtctggggagccgcacagtgactttcttcgtgtgaggctgcagcgcaccagctgggccacgccgggaggtgcc

SEQ ID NO: 3409 - DNA, 122 bp, Homo sapiens
  misc_feature (61)..(62): /note="This region represents a CpG dinucleotide"
  misc_feature (61)..(61): /note="Nucleotide may be methylated to form 5-methylcytosine"
aagtctttgcggcacaacggagtctgacttcccccaaattaatgcagttagtttattcctcgttctgatgattgccatatatagagaaagatctaattatttttatgtggcactattcctca

SEQ ID NO: 3410 - DNA, 122 bp, Homo sapiens
  misc_feature (61)..(62): /note="This region represents a CpG dinucleotide"
  misc_feature (61)..(61): /note="Nucleotide may be methylated to form 5-methylcytosine"
tgattcataaactatagtgcaataaacttgtacgaacaaaaatctaatttccatattcaacgctggttacctgaatgagccatatgagagctaatttttggaaacaacattaattctctgga

SEQ ID NO: 3411 - DNA, 122 bp, Homo sapiens
  misc_feature (61)..(62): /note="This region represents a CpG dinucleotide"
  misc_feature (61)..(61): /note="Nucleotide may be methylated to form 5-methylcytosine"
tcatgggcaatagcaacagatcccacaatactcaaatacaaaaggctacctgagataatgcggtcaggaatgggtgtaacagtgtatgttaatttaatgtcaaatacataatgtatggagaa

SEQ ID NO: 3412 - DNA, 122 bp, Homo sapiens
  misc_feature (61)..(62): /note="This region represents a CpG dinucleotide"
  misc_feature (61)..(61): /note="Nucleotide may be methylated to form 5-methylcytosine"
ccccggcgcgcgcaggcggtggaaggaggcagcgaaagttgggcaggaaacttttggccccgcccctccgccccgcccactgcgtcccgccccgcccggcgatccgctatctgcctcgcggc

SEQ ID NO: 3413 - DNA, 122 bp, Homo sapiens
  misc_feature (61)..(62): /note="This region represents a CpG dinucleotide"
  misc_feature (61)..(61): /note="Nucleotide may be methylated to form 5-methylcytosine"
taacgcattataattagcatatagtgagcagtgagcacaaccagaggtcgggatttgcctcgcttctttaccccaacctgttttgtcagcagggcctttgtgacctgactttgtgctgacct

SEQ ID NO: 3414 - DNA, 122 bp, Homo sapiens
  misc_feature (61)..(62): /note="This region represents a CpG dinucleotide"
  misc_feature (61)..(61): /note="Nucleotide may be methylated to form 5-methylcytosine"
aaaaatcattattttaaaatcaccaacccacggaagctcctttagttagactgaagttcacgtgattgcttaaaccttttttctgggaatggatcttttatgccaagtaggcagggttactg

SEQ ID NO: 3415 - DNA, 122 bp, Homo sapiens
  misc_feature (61)..(62): /note="This region represents a CpG dinucleotide"
  misc_feature (61)..(61): /note="Nucleotide may be methylated to form 5-methylcytosine"
aatggagaagagccgattcaggctactaggaccctaggctgtagattgcagctctttgttcgtttctttctctggattttagtttcttcacctgtaaaaagaagggggagttcctagataat

SEQ ID NO: 3416 - DNA, 122 bp, Homo sapiens
  misc_feature (61)..(62): /note="This region represents a CpG dinucleotide"
  misc_feature (61)..(61): /note="Nucleotide may be methylated to form 5-methylcytosine"
tcctccacttaaagcaagaatccacatgatcaccctgagcttccaagtggactaaagggccggccttctaagtgggtttcactttccctgcagtgaaatggccttctgagtaaggggctcac

SEQ ID NO: 3417 - DNA, 122 bp, Homo sapiens
  misc_feature (61)..(62): /note="This region represents a CpG dinucleotide"
  misc_feature (61)..(61): /note="Nucleotide may be methylated to form 5-methylcytosine"
caaacagagagcttgtacaggagaactcctccttttccaaaaccatcagataccttgagacgtattcactatcatgagaacagcactggaaagaccttcccccatgattcaattacttccca

SEQ ID NO: 3418 - DNA, 122 bp, Homo sapiens
  misc_feature (61)..(62): /note="This region represents a CpG dinucleotide"
  misc_feature (61)..(61): /note="Nucleotide may be methylated to form 5-methylcytosine"
tggaggttataatctggtcgtaaatgtagtagtgaaagtgcgggcaggcatattttgggacggtatcttgaggactaatctggattgggagtcagagaatgccctaataaaatccagtaaaa

SEQ ID NO: 3419 - DNA, 122 bp, Homo sapiens
  misc_feature (61)..(62): /note="This region represents a CpG dinucleotide"
  misc_feature (61)..(61): /note="Nucleotide may be methylated to form 5-methylcytosine"
ggagttcacaggcaatgagcctgttacctgtctatgagtattcagtttaaccatttcgaccgctacctccttcacaaattcttctgttaattccacaactggaattcatttttatctccttc

SEQ ID NO: 3420 - DNA, 122 bp, Homo sapiens
  misc_feature (61)..(62): /note="This region represents a CpG dinucleotide"
  misc_feature (61)..(61): /note="Nucleotide may be methylated to form 5-methylcytosine"
atagcatggatacactgggtaaagggatgattcatgtcctggatgggatggagctggactcgcaggtcaacagaaaatttcatcatgctacttagaatggtgttgtatttaaaatatataag

SEQ ID NO: 3421 - DNA, 122 bp, Homo sapiens
  misc_feature (61)..(62): /note="This region represents a CpG dinucleotide"
  misc_feature (61)..(61): /note="Nucleotide may be methylated to form 5-methylcytosine"
catttgctaggcacccgtaggaatatatgcttgagaaataggcgaaactacttgcgaacacgtgcaccgaccaaggctgctgtatgccctgcagtgcatataaacacatggtgggagtgagc

SEQ ID NO: 3422 - DNA, 122 bp, Homo sapiens
  misc_feature (61)..(62): /note="This region represents a CpG dinucleotide"
  misc_feature (61)..(61): /note="Nucleotide may be methylated to form 5-methylcytosine"
ttgcttgtatttgtctcattgctctaattctccagtctcctattgccaccctcctctctccgacttgttagatgtaaacgacggtattcactgaaattagatctccttgctcaatgagtcat

SEQ ID NO: 3423 - DNA, 122 bp, Homo sapiens
  misc_feature (61)..(62): /note="This region represents a CpG dinucleotide"
  misc_feature (61)..(61): /note="Nucleotide may be methylated to form 5-methylcytosine"
gccatgggagagggagatgggagcgtttcaggacagagcacgtgtcgctgtgtctgattccgttgaggagtcaagcgtgtaaagactggagtgtctactggatttacaatacggggacacag

SEQ ID NO: 3424 - DNA, 122 bp, Homo sapiens
  misc_feature (61)..(62): /note="This region represents a CpG dinucleotide"
  misc_feature (61)..(61): /note="Nucleotide may be methylated to form 5-methylcytosine"
gttctcgttttgttgcccagactcatcctgaacttctgagctcgggcaattcttttgcttcgtccttccaaagtgctgggattacaggcatgagccaccatgcccggcttgtatctgtatta

SEQ ID NO: 3425 - DNA, 122 bp, Homo sapiens
  misc_feature (61)..(62): /note="This region represents a CpG dinucleotide"
  misc_feature (61)..(61): /note="Nucleotide may be methylated to form 5-methylcytosine"
gaatgccaaatgccccaaattttgagtctgcacagtcagttttatataattaatttactgcgaaggacagaaaggcattctagcatggggatgcaagcacatcgtttcagggaaaaaaacca

SEQ ID NO: 3426 - DNA, 122 bp, Homo sapiens
  misc_feature (61)..(62): /note="This region represents a CpG dinucleotide"
  misc_feature (61)..(61): /note="Nucleotide may be methylated to form 5-methylcytosine"
agaccgtgtgtcttttattgatgattggtgtgacaatcagaactctcggcagatttatcacggcattcaggtgaattgaagggaaacagggcattctctggacaaacaacttctatcttcac

SEQ ID NO: 3427 - DNA, 122 bp, Homo sapiens
  misc_feature (61)..(62): /note="This region represents a CpG dinucleotide"
  misc_feature (61)..(61): /note="Nucleotide may be methylated to form 5-methylcytosine"
ggtggcgactcagacctctcgggcagcggctgcagggcgagcacagaggggactccgatgcgaaccgaggccccgggacccgccaggccacccgcgccgccgcccctctccgggtacgcgcg

SEQ ID NO: 3428 - DNA, 122 bp, Homo sapiens
  misc_feature (61)..(62): /note="This region represents a CpG dinucleotide"
  misc_feature (61)..(61): /note="Nucleotide may be methylated to form 5-methylcytosine"
tggcgggaatgggaggaagagagagagggggaagtgttacacacttaaatagccagatggcgtgagaactctatcatgagaactgcaccaaaggggaaaatccacctctgtgatccaatcgc

SEQ ID NO: 3429 - DNA, 122 bp, Homo sapiens
  misc_feature (61)..(62): /note="This region represents a CpG dinucleotide"
  misc_feature (61)..(61): /note="Nucleotide may be methylated to form 5-methylcytosine"
gtaaacacattataattggagaatggatgagggcgctgtaaggttagccgagagaaaggacgagagagagacccaaggtcaggagagtaagtttactaacctgccaggctgcttcaccacag

SEQ ID NO: 3430 - DNA, 122 bp, Homo sapiens
  misc_feature (61)..(62): /note="This region represents a CpG dinucleotide"
  misc_feature (61)..(61): /note="Nucleotide may be methylated to form 5-methylcytosine"
tatctgaggcctcctgctaacagtcaacaccaactcatcaggcatgtgagtgagccaccacggaactggatcctccagccccactgaagcctttagatgactgcatgactgcaaccctggcc

SEQ ID NO: 3431 - DNA, 122 bp, Homo sapiens
  misc_feature (61)..(62): /note="This region represents a CpG dinucleotide"
  misc_feature (61)..(61): /note="Nucleotide may be methylated to form 5-methylcytosine"
tagcataatgttatcaaagttcatattacagtatctgttagaacaaagcagttaatttcacgtggtcaaaggaaggtcagggaagttttccttgatgatccttactgcttttaagtaccaga

SEQ ID NO: 3432 - DNA, 122 bp, Homo sapiens
  misc_feature (61)..(62): /note="This region represents a CpG dinucleotide"
  misc_feature (61)..(61): /note="Nucleotide may be methylated to form 5-methylcytosine"
tggaattcaaatatactaatttgattctctgtgtcccatttctgatttgaacagagccgccgattgttacctggtatgcaattttagatccctgcattcctgttgttcctaacaacggcttg

SEQ ID NO: 3433 - DNA, 122 bp, Homo sapiens
  misc_feature (61)..(62): /note="This region represents a CpG dinucleotide"
  misc_feature (61)..(61): /note="Nucleotide may be methylated to form 5-methylcytosine"
tggactggaaagtgacttagtccagccccttctagctgggtgagtaactgaacactccagcgtgcggatcttcactggagagaaatgggagcatgattcatctctttgacatcatctttaga

SEQ ID NO: 3434 - DNA, 122 bp, Homo sapiens
  misc_feature (61)..(62): /note="This region represents a CpG dinucleotide"
  misc_feature (61)..(61): /note="Nucleotide may be methylated to form 5-methylcytosine"
ctttctgttgaagggatttcccatatttaccaaattcacagggctttgctccagtgtgaacgctctgtgattaactaaggatggagctctggctaaaggacatcctatattcaccatacaca

SEQ ID NO: 3435 - DNA, 122 bp, Homo sapiens
  misc_feature (61)..(62): /note="This region represents a CpG dinucleotide"
  misc_feature (61)..(61): /note="Nucleotide may be methylated to form 5-methylcytosine"
tgtcttgtgccgggtgcagaggacattgaggtggggctgcctcatgcttcacagtcctagcgttattttccatgccatctgtgttctgactaaacccactttaggtatggggaaactgatgc

SEQ ID NO: 3436 - DNA, 122 bp, Homo sapiens
  misc_feature (61)..(62): /note="This region represents a CpG dinucleotide"
  misc_feature (61)..(61): /note="Nucleotide may be methylated to form 5-methylcytosine"
cctggctaattttgtgtgtgtgtgggtgggtgggtatagatgggcttttgctatgttgcccgggctggtcttggaactcctggactcaagcaagcctcctgctttggcctctctcagtactg

SEQ ID NO: 3437 - DNA, 122 bp, Homo sapiens
  misc_feature (61)..(62): /note="This region represents a CpG dinucleotide"
  misc_feature (61)..(61): /note="Nucleotide may be methylated to form 5-methylcytosine"
tgatgatccctgtgtcagcatcaatgtgtgctgcttggtgacagacaggcaactgagcctcgtaaaagactgacagggcccttccaccccagagtcatgctgaggcaggggacacccccctg

SEQ ID NO: 3438 - DNA, 122 bp, Homo sapiens
  misc_feature (61)..(62): /note="This region represents a CpG dinucleotide"
  misc_feature (61)..(61): /note="Nucleotide may be methylated to form 5-methylcytosine"
ttacagttatagcggaaggagaagaaggaccttcttcacatggaggcaagagagagcaagcggggaactgccatacttttaggccatgggaggtggttggagaagattgcatcatgggagag

SEQ ID NO: 3439 - DNA, 122 bp, Homo sapiens
  misc_feature (61)..(62): /note="This region represents a CpG dinucleotide"
  misc_feature (61)..(61): /note="Nucleotide may be methylated to form 5-methylcytosine"
gtcagatcagcaggggcattagattctcacaggagcacgaatcctgttgtgaactgtacacgtgagtgatctaggctgcacactcgttataagaatctaatgtctgatgatctgtcactgtc

SEQ ID NO: 3440 - DNA, 122 bp, Homo sapiens
  misc_feature (61)..(62): /note="This region represents a CpG dinucleotide"
  misc_feature (61)..(61): /note="Nucleotide may be methylated to form 5-methylcytosine"
atggagtatgtggactgtgcaaagccataaaaaatccaaaagaatataaaaattatgaagcgatgagtcaataggcagatgtttgtaaaaagacaaagtaacaaagggcatgcatcaagtag

SEQ ID NO: 3441 - DNA, 122 bp, Homo sapiens
  misc_feature (61)..(62): /note="This region represents a CpG dinucleotide"
  misc_feature (61)..(61): /note="Nucleotide may be methylated to form 5-methylcytosine"
aaatgagttcagcaggactgcaaggagctacagcattccaaccctgtgtgtgacaggggccgaagccagagggtgccaggcccaggaggggaaccctgcaatgctcacctcggctgcagctg

SEQ ID NO: 3442 - DNA, 122 bp, Homo sapiens
  misc_feature (61)..(62): /note="This region represents a CpG dinucleotide"
  misc_feature (61)..(61): /note="Nucleotide may be methylated to form 5-methylcytosine"
agtcccacctgggatgtgaatcatccctttgttccgcatatccatgctttatatgctactcgcgcattagtcacttagtagctgtttcagttaccggattgactgttgtagtactgcagcag

SEQ ID NO: 3443 - DNA, 122 bp, Homo sapiens
  misc_feature (61)..(62): /note="This region represents a CpG dinucleotide"
  misc_feature (61)..(61): /note="Nucleotide may be methylated to form 5-methylcytosine"
ctcaaatgatccgcccgcctcggcctcccaaagtgctgggattacaggcgtgagccaccgcgcccggcccgatttgcgttttaaagtcgctctgaacaataaaatccggaaggactggaggg

SEQ ID NO: 3444 - DNA, 122 bp, Homo sapiens
  misc_feature (61)..(62): /note="This region represents a CpG dinucleotide"
  misc_feature (61)..(61): /note="Nucleotide may be methylated to form 5-methylcytosine"
tgggggccggacgcagtggctcatgcctgtaatcccagcactttgggaggctgacgtggacggatggcttgagcccagaaggaggctgcagtaagctaggatcacattactgtactccagcc

SEQ ID NO: 3445 - DNA, 122 bp, Homo sapiens
  misc_feature (61)..(62): /note="This region represents a CpG dinucleotide"
  misc_feature (61)..(61): /note="Nucleotide may be methylated to form 5-methylcytosine"
ctgcacacgtggaacgcagcatttcgggttgtttatttatccaggcgggctttgaggttacggaatatttttaaacaaccaacagctggggccagggagccacctcttctctctcggatcct

SEQ ID NO: 3446 - DNA, 122 bp, Homo sapiens
  misc_feature (61)..(62): /note="This region represents a CpG dinucleotide"
  misc_feature (61)..(61): /note="Nucleotide may be methylated to form 5-methylcytosine"
ctcattctctctgatatttagctgtgtcagatggggaaaaccttttgctttatatagctgcgcttacgtacacccaggctgaagatgaatcagggaagccgctccaaatgcaagggaagtga

SEQ ID NO: 3447 - DNA, 122 bp, Homo sapiens
  misc_feature (61)..(62): /note="This region represents a CpG dinucleotide"
  misc_feature (61)..(61): /note="Nucleotide may be methylated to form 5-methylcytosine"
gctttttgaaggaaagaaatagtcacgcagacttttcaggaggacgctgtgaagacacaacgaggttttatatgtgtagcaggagacataatcatccgtggaacaaaactggctcccttatt

SEQ ID NO: 3448 - DNA, 122 bp, Homo sapiens
  misc_feature (61)..(62): /note="This region represents a CpG dinucleotide"
  misc_feature (61)..(61): /note="Nucleotide may be methylated to form 5-methylcytosine"
atcaaaagcagagactctctttaaccagtacagcctcttttccagagaatgccaaggagacgctaacccagtttggtcctgagctggtttccatctccatgattcatgccataaatgtcatc

SEQ ID NO: 3449 - DNA, 122 bp, Homo sapiens
  misc_feature (61)..(62): /note="This region represents a CpG dinucleotide"
  misc_feature (61)..(61): /note="Nucleotide may be methylated to form 5-methylcytosine"
agggagaacttgggcatttccacacctctgaccttacaaccctcaagagcaccaacatcccgtcctgatgctgtgtgatccccgctgctccaatagtactgtgggtgttggcacaacagaca

SEQ ID NO: 3450 - DNA, 122 bp, Homo sapiens
  misc_feature (61)..(62): /note="This region represents a CpG dinucleotide"
  misc_feature (61)..(61): /note="Nucleotide may be methylated to form 5-methylcytosine"
tgtcgaaagtgaggtcatgtttctcctggattatgcccgtatctgatgagcctcggctggcgtgaatccgagacaatgaaataatcacacccattagctcaccagggccctattaagatgtg

SEQ ID NO: 3451 - DNA, 122 bp, Homo sapiens
  misc_feature (61)..(62): /note="This region represents a CpG dinucleotide"
  misc_feature (61)..(61): /note="Nucleotide may be methylated to form 5-methylcytosine"
cagcaagtactgtatgtctattcttcttctctcttaaatgtggctcatgctatttaaatgcgaaacaatggcttgagtttaggtcttgacaagctgtatctgaaatgacagtggttgctcca

SEQ ID NO: 3452 - DNA, 122 bp, Homo sapiens
  misc_feature (61)..(62): /note="This region represents a CpG dinucleotide"
  misc_feature (61)..(61): /note="Nucleotide may be methylated to form 5-methylcytosine"
tatttctgtaataggtttgttgtgagaataaagggagcttggtatcagctcttagaataccggacaggccacgttggctccactaagctgttgtcatcatccctaagggcacccagttaaaa

SEQ ID NO: 3453 - DNA, 122 bp, Homo sapiens
  misc_feature (61)..(62): /note="This region represents a CpG dinucleotide"
  misc_feature (61)..(61): /note="Nucleotide may be methylated to form 5-methylcytosine"
agttttataaaactccgcagtttgcaaagagcttccacatacatcacatctcatttcattcgcacagttccacaaggttcatacatagggcaggtgcggagacaggtttatgacttgcccaa

SEQ ID NO: 3454 - DNA, 122 bp, Homo sapiens
  misc_feature (61)..(62): /note="This region represents a CpG dinucleotide"
  misc_feature (61)..(61): /note="Nucleotide may be methylated to form 5-methylcytosine"
ttcccccctcgcagcctcggtccttccccgctgcctgcaagtcagcctggctccgagtcacgtgtcagtgcctgaggcagagactgcgagaaaaaaacgcgcttcattccttcttccaccgc

SEQ ID NO: 3455 - DNA, 122 bp, Homo sapiens
  misc_feature (61)..(62): /note="This region represents a CpG dinucleotide"
  misc_feature (61)..(61): /note="Nucleotide may be methylated to form 5-methylcytosine"
ttcacctaggacctcattatatactaataaacatactgaatcacacacccaccaataccacgacagttctggggaaatccatatttggtataaaaatgggtgacaccacagttctgagaaat

SEQ ID NO: 3456 - DNA, 122 bp, Homo sapiens
  misc_feature (61)..(62): /note="This region represents a CpG dinucleotide"
  misc_feature (61)..(61): /note="Nucleotide may be methylated to form 5-methylcytosine"
ctgccaaacttaaaaaaaaaaacggcaagtttcattggcttttaattctatataaaggtacgccctgcctgccagatgtgggtaagtgcaatagaattaaagttgtttaatcctcagcattg

SEQ ID NO: 3457 - DNA, 122 bp, Homo sapiens
  misc_feature (61)..(62): /note="This region represents a CpG dinucleotide"
  misc_feature (61)..(61): /note="Nucleotide may be methylated to form 5-methylcytosine"
gctcctgttgcaagtttctagaactcacaggtggagaatgaaatttcagtttccaaaccacgttcgtgctcctccaggcatgactgtgagcagtattctgatttgccatgaggcctggggat

SEQ ID NO: 3458 - DNA, 122 bp, Homo sapiens
  misc_feature (61)..(62): /note="This region represents a CpG dinucleotide"
  misc_feature (61)..(61): /note="Nucleotide may be methylated to form 5-methylcytosine"
cacttgcccttaaccagctgtacttgagctcaagtccagcttacttggactgagctgttacgttcatccctgattcattcattgaacaaatagttattgagtgcctgtcatgtgccagccct

SEQ ID NO: 3459 - DNA, 122 bp, Homo sapiens
  misc_feature (61)..(62): /note="This region represents a CpG dinucleotide"
  misc_feature (61)..(61): /note="Nucleotide may be methylated to form 5-methylcytosine"
cactcttcctcagaactaataggatatatgtgtacatgaaagggagtttattaaggagaacggactcacaggatcacaaggtgaagtcccatgaaagtctgcctccaagtcgaggagcaagg

SEQ ID NO: 3460 - DNA, 122 bp, Homo sapiens
  misc_feature (61)..(62): /note="This region represents a CpG dinucleotide"
  misc_feature (61)..(61): /note="Nucleotide may be methylated to form 5-methylcytosine"
ggggctgcagatcttcagggatcttcatgaactgaaattcttcacgatagcaccaaggaacggtgcataaaagcaatagtttatggattgcttggacagggcaaaagactccatgatccctc

SEQ ID NO: 3461 - DNA, 122 bp, Homo sapiens
  misc_feature (61)..(62): /note="This region represents a CpG dinucleotide"
  misc_feature (61)..(61): /note="Nucleotide may be methylated to form 5-methylcytosine"
taactcagcatgttcccggccacatcccggtgaaccatgcagcctaactcaccacgttcccggccacacagggccaagaacagcccaggcaatgttaaggagcattgcatggaggagccact

SEQ ID NO: 3462 - DNA, 122 bp, Homo sapiens
  misc_feature (61)..(62): /note="This region represents a CpG dinucleotide"
  misc_feature (61)..(61): /note="Nucleotide may be methylated to form 5-methylcytosine"
ttctgagcactctgttcatggtaacctcagttgttactcttaagagccctgccacatgggcgcggtttttatggccattttttacaaagggaaattcaggccactggtaagtggcacactgg

SEQ ID NO: 3463 - DNA, 122 bp, Homo sapiens
  misc_feature (61)..(62): /note="This region represents a CpG dinucleotide"
  misc_feature (61)..(61): /note="Nucleotide may be methylated to form 5-methylcytosine"
ttggtctggccagtcagggcaagagtgcagggtcacaaggtccaaagcatggcaactaagcgtcaaaaacccttcagggtgagatttggaaatggacagatatctgtcaaaagagagttatg

SEQ ID NO: 3464 - DNA, 122 bp, Homo sapiens
  misc_feature (61)..(62): /note="This region represents a CpG dinucleotide"
  misc_feature (61)..(61): /note="Nucleotide may be methylated to form 5-methylcytosine"
aatgacatgccaacttcattccttttattgccagatcagctccctagaggtcagagtgaccgtgtcacttgtctggtcacagagccagagagaacatgaactgggagatcaggtcagttgga

SEQ ID NO: 3465 - DNA, 122 bp, Homo sapiens
  misc_feature (61)..(62): /note="This region represents a CpG dinucleotide"
  misc_feature (61)..(61): /note="Nucleotide may be methylated to form 5-methylcytosine"
tagccttggcaggcgtgggtctgagctgttttcctttatgtcgttggcaggtctttctcccgctaattgtgttctcggagctggggttcatttttgccggatgtgttacacatgtgcaagcg

SEQ ID NO: 3466 - DNA, 122 bp, Homo sapiens
  misc_feature (61)..(62): /note="This region represents a CpG dinucleotide"
  misc_feature (61)..(61): /note="Nucleotide may be methylated to form 5-methylcytosine"
ggcagaggtgattggccgggctctgctgcagtgagaatgcagactggatgctcgggtcctcggcttgggtgatgagcgaggacagctgaataactgggagctcgaagttgcttgctgcctcc

SEQ ID NO: 3467 - DNA, 122 bp, Homo sapiens
  misc_feature (61)..(62): /note="This region represents a CpG dinucleotide"
  misc_feature (61)..(61): /note="Nucleotide may be methylated to form 5-methylcytosine"
gcagtgcaacctcgaaccaccttctttgctcattgtgcataattgcctttctttggatgccgtagccgacccttggttccccttgttgccgatggataggaattaattcatatgagcaatgt

SEQ ID NO: 3468 - DNA, 122 bp, Homo sapiens
  misc_feature (61)..(62): /note="This region represents a CpG dinucleotide"
  misc_feature (61)..(61): /note="Nucleotide may be methylated to form 5-methylcytosine"
gtaggaaccacagccaggtttcacaaataaaactgatgacagaacccatgtgtctcattgcgctggctgctgagaaattgcgcaaaccgtggcaacaatgagcttttgttttgtgaacccaa

SEQ ID NO: 3469 - DNA, 122 bp, Homo sapiens
  misc_feature (61)..(62): /note="This region represents a CpG dinucleotide"
  misc_feature (61)..(61): /note="Nucleotide may be methylated to form 5-methylcytosine"
cacactacaacatggatgaaccctgaggaccttacacttagtgaaataagccagtcataccgtgtcagcttatttataagaggtacttagagtagtcaaaatcacagagacagaaagtagag

SEQ ID NO: 3470 - DNA, 122 bp, Homo sapiens
  misc_feature (61)..(62): /note="This region represents a CpG dinucleotide"
  misc_feature (61)..(61): /note="Nucleotide may be methylated to form 5-methylcytosine"
agtgactttggatgctgaacacttgtacctctgttttctcctgtgtgtaatggccatggccgtcctaataccacccgaactgcctcttcctatgtggctgtgcagcttactcgggacattgg

SEQ ID NO: 3471 - DNA, 122 bp, Homo sapiens
  misc_feature (61)..(62): /note="This region represents a CpG dinucleotide"
  misc_feature (61)..(61): /note="Nucleotide may be methylated to form 5-methylcytosine"
acataatcaattaatctaaatgaatgaggcagcactgaacttcctggcattagcagtgggcggaggaggtactcggttggacagtggagcgtcatctcgtccttgaaaccccaaggttaggt

SEQ ID NO: 3472 - DNA, 122 bp, Homo sapiens
  misc_feature (61)..(62): /note="This region represents a CpG dinucleotide"
  misc_feature (61)..(61): /note="Nucleotide may be methylated to form 5-methylcytosine"
cacctgattgaagccttcttccttgacagtactcatctcagtcattgactttctatgtggcgagcagcaggacctacaccgaaaccctggtgtttcagtaacagttcagggtggaaacaacc

SEQ ID NO: 3473 - DNA, 122 bp, Homo sapiens
  misc_feature (61)..(62): /note="This region represents a CpG dinucleotide"
  misc_feature (61)..(61): /note="Nucleotide may be methylated to form 5-methylcytosine"
ttgctcatccttatctccagtcacttcctgcttcacactctactcaggcattctgagccacgggtgtcctcagacacatgccgttttgtgcttcttaggaatttgcctgtgttcagcttgga

SEQ ID NO: 3474 - DNA, 122 bp, Homo sapiens
  misc_feature (61)..(62): /note="This region represents a CpG dinucleotide"
  misc_feature (61)..(61): /note="Nucleotide may be methylated to form 5-methylcytosine"
attcttccatgtacacacaatgtaatatcggtagaattatcttcggatatgaagcacaagcgaagaccatagaggttagcagtacccaggagaaaaaatattttggcagactgggaacagat

SEQ ID NO: 3475 - DNA, 122 bp, Homo sapiens
  misc_feature (61)..(62): /note="This region represents a CpG dinucleotide"
  misc_feature (61)..(61): /note="Nucleotide may be methylated to form 5-methylcytosine"
gaactgctgcatgactgcactgcatgcgtcgcatacacagggtaggtgccaagtgagtgtcgtccaccttagaagaccagtctcaagagaggattcagcccactggggacagttggctgatg

SEQ ID NO: 3476 - DNA, 122 bp, Homo sapiens
  misc_feature (61)..(62): /note="This region represents a CpG dinucleotide"
  misc_feature (61)..(61): /note="Nucleotide may be methylated to form 5-methylcytosine"
catgatttattgtaatttttacttaattctgcctccttctgtaggccctggttccaagaacgtcttttgggcccgatgcctccatggctcagatacttgggaacagcaatttgccataatgt

SEQ ID NO: 3477 - DNA, 122 bp, Homo sapiens
  misc_feature (61)..(62): /note="This region represents a CpG dinucleotide"
  misc_feature (61)..(61): /note="Nucleotide may be methylated to form 5-methylcytosine"
atgtaagggaagaaaaagccaagtcccagttgccaagtctgttaacgacacacataatggcgtgttaacacaaatgattatcgagctggacagcacccagctttctgccaaaacaaaccttc

SEQ ID NO: 3478 - DNA, 122 bp, Homo sapiens
  misc_feature (61)..(62): /note="This region represents a CpG dinucleotide"
  misc_feature (61)..(61): /note="Nucleotide may be methylated to form 5-methylcytosine"
ggctgttgcgaggattaaatgcacatgaatgcactcagtgacagcctcacttaccaagtgcgcagtaaatgtctgttgttgctagtaaagcagacatttgaaaattaagagcgtaccctggc

SEQ ID NO: 3479 - DNA, 122 bp, Homo sapiens
  misc_feature (61)..(62): /note="This region represents a CpG dinucleotide"
  misc_feature (61)..(61): /note="Nucleotide may be methylated to form 5-methylcytosine"
aagctaaacatttacgatttgtgtactttttttctaaaggattattaaacttcggcaaaacgttttaaaagtgtcatgagttcaagaggagtaatgattcattgaaagagtaagacattgga

SEQ ID NO: 3480 - DNA, 122 bp, Homo sapiens
  misc_feature (61)..(62): /note="This region represents a CpG dinucleotide"
  misc_feature (61)..(61): /note="Nucleotide may be methylated to form 5-methylcytosine"
gctggaggcgccgccggcgacccccccctaggcctcgcaggcgctgcctccgcctatccccgctgaccactctgcgcccccgcagccgcgggtctccctgcctagtccgcgcaccctgcccg

SEQ ID NO: 3481 - DNA, 122 bp, Homo sapiens
  misc_feature (61)..(62): /note="This region represents a CpG dinucleotide"
  misc_feature (61)..(61): /note="Nucleotide may be methylated to form 5-methylcytosine"
aattaactgtacactatttaatccaccagttccggttcattagaaaaatgcagttctcgccggacatggtggctcacacctgtaatcccagcaattctggaggccaaggtgggcagattgct

SEQ ID NO: 3482 - DNA, 122 bp, Homo sapiens
  misc_feature (61)..(62): /note="This region represents a CpG dinucleotide"
  misc_feature (61)..(61): /note="Nucleotide may be methylated to form 5-methylcytosine"
acatcaccacacccggctaatttttgtattaacatttttggtagagacggggttttgctacgttgcccagagtgatctcgagctcctaggctcaagtgatcctcctaccttggcctcccaaa

SEQ ID NO: 3483 - DNA, 122 bp, Homo sapiens
  misc_feature (61)..(62): /note="This region represents a CpG dinucleotide"
  misc_feature (61)..(61): /note="Nucleotide may be methylated to form 5-methylcytosine"
atagtccaagcaaatatttcatcacttctctagggacttccgctgaaaatttcagaacgtcgctctgtacgcagagtcctgggccctttctagtactcagctcaaggagtccaggctgtgga

SEQ ID NO: 3484 - DNA, 122 bp, Homo sapiens
  misc_feature (61)..(62): /note="This region represents a CpG dinucleotide"
  misc_feature (61)..(61): /note="Nucleotide may be methylated to form 5-methylcytosine"
gagtatttccagtcctgttggtagccacccaaaatgtttgagggagttagactaaaagatcgtcaaggtcctttgtagacgaaaagtactatgactccagtgacggaatgacatggcagtca

SEQ ID NO: 3485 - DNA, 122 bp, Homo sapiens
  misc_feature (61)..(62): /note="This region represents a CpG dinucleotide"
  misc_feature (61)..(61): /note="Nucleotide may be methylated to form 5-methylcytosine"
tgtggctccccttcaccttccgccttgagtggaagcagcctgaggccctcaccatcctggcgccatgtttcttgtccagcatgcagaactgtgagccaaatgaaacttttttttttggagac

SEQ ID NO: 3486 - DNA, 122 bp, Homo sapiens
  misc_feature (61)..(62): /note="This region represents a CpG dinucleotide"
  misc_feature (61)..(61): /note="Nucleotide may be methylated to form 5-methylcytosine"
gctctgcgccgccctcgccctcggatcccctggagggtgcgcagccgggcgtcaccagatcgggtccctctcatgccccgtgaacgcaactattctccggggcaactggctccactgcccag

SEQ ID NO: 3487 - DNA, 122 bp, Homo sapiens
  misc_feature (61)..(62): /note="This region represents a CpG dinucleotide"
  misc_feature (61)..(61): /note="Nucleotide may be methylated to form 5-methylcytosine"
aaaagctttaaataggggaaagagggaagaaaagaggcagaataaataaaagacttgaagcggttgcattcctctgaggcttttaatggtgttcactgaattcacattttacatgtgaaaag

SEQ ID NO: 3488 - DNA, 122 bp, Homo sapiens
  misc_feature (61)..(62): /note="This region represents a CpG dinucleotide"
  misc_feature (61)..(61): /note="Nucleotide may be methylated to form 5-methylcytosine"
agttgcccttgggaagggtgtgtgtgtgtgtgtgtgtgtgtgtgtgtgtgtgtgcgcgcgcgcatgtgtgtgtgtgtatgtagtgagtgaatagctctcttcaagtatctgaagagcatctt

SEQ ID NO: 3489 - DNA, 122 bp, Homo sapiens
  misc_feature (61)..(62): /note="This region represents a CpG dinucleotide"
  misc_feature (61)..(61): /note="Nucleotide may be methylated to form 5-methylcytosine"
cagtactctataccactacaaaaacagtcataaagagcttaacatactcagcataacgatcgtggtttactttttgcaagccatgtatctttcagttacattctcccagttgattacattcc

SEQ ID NO: 3490 - DNA, 122 bp, Homo sapiens
  misc_feature (61)..(62): /note="This region represents a CpG dinucleotide"
  misc_feature (61)..(61): /note="Nucleotide may be methylated to form 5-methylcytosine"
taaggagtctagggcttagagaactgtcttgccccaggtaatagcaaaatagaggcagagcggagacaggttttctgacgataagcctagtgtttctgccagcacaccatcaataagcagat

SEQ ID NO: 3491 - DNA, 122 bp, Homo sapiens
  misc_feature (61)..(62): /note="This region represents a CpG dinucleotide"
  misc_feature (61)..(61): /note="Nucleotide may be methylated to form 5-methylcytosine"
aattttgtaaccttccgctcagtttccggtaaccgccattttgtctcctgtaacaatttacgcgccgtgtaactgtgaatctttcaaaggtatgttttactggagtgatttctggttatttc

SEQ ID NO: 3492 - DNA, 122 bp, Homo sapiens
  misc_feature (61)..(62): /note="This region represents a CpG dinucleotide"
  misc_feature (61)..(61): /note="Nucleotide may be methylated to form 5-methylcytosine"
ttggtctgggatatgacctgagcgatgggatttttagaagtttcccaggtgattataatacgaagccaaggttgagaaccacaggtctacagctaatgccacagcccaaagaataagtctat

SEQ ID NO: 3493 - DNA, 122 bp, Homo sapiens
  misc_feature (61)..(62): /note="This region represents a CpG dinucleotide"
  misc_feature (61)..(61): /note="Nucleotide may be methylated to form 5-methylcytosine"
gcacccgtcctgccgtgatgctgtcacagtcccccaaaggctgtggacccatctggggcacggactgtttctacttggcttgtgtttcctcatcagggctccacacacaaaaagcacccgac

SEQ ID NO: 3494 - DNA, 122 bp, Homo sapiens
  misc_feature (61)..(62): /note="This region represents a CpG dinucleotide"
  misc_feature (61)..(61): /note="Nucleotide may be methylated to form 5-methylcytosine"
gtaaccatcgcaaagtcccttgcagcccagattttcagagagtaactacaacagaaaatacgataaaagaaaacagcactgtgatgagtaataggacattggtgcaaagagaggagcttgtt

SEQ ID NO: 3495 - DNA, 122 bp, Homo sapiens
  misc_feature (61)..(62): /note="This region represents a CpG dinucleotide"
  misc_feature (61)..(61): /note="Nucleotide may be methylated to form 5-methylcytosine"
caattttcataaaagacacagtatctgagatggctgttaaacatgtcaagagattgtgtacgaggggaataaatcaaggaagactctataggttggtctgattctgtgatattaccagaatt

SEQ ID NO: 3496 - DNA, 122 bp, Homo sapiens
  misc_feature (61)..(62): /note="This region represents a CpG dinucleotide"
  misc_feature (61)..(61): /note="Nucleotide may be methylated to form 5-methylcytosine"
ctgtgttcagctatccagaagctctccaaactccatcctcttgggctttaatggaagcttcgcaaggtcagcattccttcccccagggtatgcggtggggccctctctggagaaccccagtt

SEQ ID NO: 3497 - DNA, 122 bp, Homo sapiens
  misc_feature (61)..(62): /note="This region represents a CpG dinucleotide"
  misc_feature (61)..(61): /note="Nucleotide may be methylated to form 5-methylcytosine"
attttccctcacacacgcatttctcctaataaaatatttgcaggtttactcccatcttagcgtctgctttttagatgacacacagttacacagcaacaaatgcaatgtgttatatccttgga

SEQ ID NO: 3498 - DNA, 122 bp, Homo sapiens
  misc_feature (61)..(62): /note="This region represents a CpG dinucleotide"
  misc_feature (61)..(61): /note="Nucleotide may be methylated to form 5-methylcytosine"
ggcttgaacagagagggtgtcttttcccttaggggaggaacacccatgctgaagtcccttcgctctgcgcctagcttggcacccctcgggcgtccttagcccgaggtcccagccagccctgg

SEQ ID NO: 3499 - DNA, 122 bp, Homo sapiens
  misc_feature (61)..(62): /note="This region represents a CpG dinucleotide"
  misc_feature (61)..(61): /note="Nucleotide may be methylated to form 5-methylcytosine"
cagtttactgcttatattcagggtgtctcatctttctggcaatcaggataaattgtgtctcggtaataacattgtagcaagctattctttaccgtgaggagcctgtaatgactgtgtcttac

SEQ ID NO: 3500 - DNA, 122 bp, Homo sapiens
  misc_feature (61)..(62): /note="This region represents a CpG dinucleotide"
  misc_feature (61)..(61): /note="Nucleotide may be methylated to form 5-methylcytosine"
ctggccaaaatacagttgttaaaaactcaagtgatagagcttgtaggaatactggtagagcgagttattctctcagaagagtacttttgctgaaggcatattgagttgttaaactctggttt

SEQ ID NO: 3501 - DNA, 122 bp, Homo sapiens
  misc_feature (61)..(62): /note="This region represents a CpG dinucleotide"
  misc_feature (61)..(61): /note="Nucleotide may be methylated to form 5-methylcytosine"
tagatagttagacgttatcaaagccaatgcagcatgtcaaatagacagttttacgatcgccgtgcgggcgccttcatgatccgtgtttgtgaataccagacatcccgagctgtctgcagagg

SEQ ID NO: 3502 - DNA, 122 bp, Homo sapiens
  misc_feature (61)..(62): /note="This region represents a CpG dinucleotide"
  misc_feature (61)..(61): /note="Nucleotide may be methylated to form 5-methylcytosine"
acgcccagctaatttttttgtattttcaaacagacccactgccccacctccaggtgtaaccgaaatgcaggttcagttgcttgcagcttgcagagtccaattaaaatgagcaaggtctggta

SEQ ID NO: 3503 - DNA, 122 bp, Homo sapiens
  misc_feature (61)..(62): /note="This region represents a CpG dinucleotide"
  misc_feature (61)..(61): /note="Nucleotide may be methylated to form 5-methylcytosine"
accctctcttacaggaatcccctggaccagatatggaactctcaccactgcacagggctacgcacacagcaggtacccaggatctgggctttagatctggtcaagccagataggtctcatga

SEQ ID NO: 3504 - DNA, 122 bp, Homo sapiens
  misc_feature (61)..(62): /note="This region represents a CpG dinucleotide"
  misc_feature (61)..(61): /note="Nucleotide may be methylated to form 5-methylcytosine"
tcgcttatggaggacatactatctgtcaggacagtgccaggcattttatatgtacgccttcgtttaatccccagagtcatcctgtgagataggtatgaatcatcattttacagataaagaat

SEQ ID NO: 3505 - DNA, 122 bp, Homo sapiens
  misc_feature (61)..(62): /note="This region represents a CpG dinucleotide"
  misc_feature (61)..(61): /note="Nucleotide may be methylated to form 5-methylcytosine"
ttaagagctgtaacactcaccgcaaaggtctgcagcttcactcctgagccagcgagaccacgaacacaccaaaaggaagaaactcgcgacacatccaaacatcagaaggaacaaactccaga

SEQ ID NO: 3506 - DNA, 122 bp, Homo sapiens
  misc_feature (61)..(62): /note="This region represents a CpG dinucleotide"
  misc_feature (61)..(61): /note="Nucleotide may be methylated to form 5-methylcytosine"
tctctcctccttctgtgtctggtgatggcaaacgtttatctttgctcaggcctgggtgcacgctaacctcggccaaatctctgaatgttcaaacatctgccaaaataccacatttcgacaat

SEQ ID NO: 3507 - DNA, 122 bp, Homo sapiens
  misc_feature (61)..(62): /note="This region represents a CpG dinucleotide"
  misc_feature (61)..(61): /note="Nucleotide may be methylated to form 5-methylcytosine"
tacaaatttagccagaactgtctatgtgtgcccctgcccggttataagccaaattcatgccgtgcctttgcctaagaggatgagacttcgaggcacagagagaaaggagggaggctgtcaaa

SEQ ID NO: 3508 - DNA, 122 bp, Homo sapiens
  misc_feature (61)..(62): /note="This region represents a CpG dinucleotide"
  misc_feature (61)..(61): /note="Nucleotide may be methylated to form 5-methylcytosine"
tgcctatgtagtctctggctacacgtgattgtcctgtgtgatacgatgccatgatctggccgtctcttacagtacagcttttcattccgagatagcctgtcgtgctggctgttttggatgaa

SEQ ID NO: 3509 - DNA, 122 bp, Homo sapiens
  misc_feature (61)..(62): /note="This region represents a CpG dinucleotide"
  misc_feature (61)..(61): /note="Nucleotide may be methylated to form 5-methylcytosine"
tacagtgttcagtacagtaacatgccagacaggtttgtagtctaggagcaatcagctacacggtgtagcctaggtctgtagtaggctatgctacctaggtttatgtaagtgccctctatgac

SEQ ID NO: 3510 - DNA, 122 bp, Homo sapiens
  misc_feature (61)..(62): /note="This region represents a CpG dinucleotide"
  misc_feature (61)..(61): /note="Nucleotide may be methylated to form 5-methylcytosine"
ggtcccggcgcaaagacggtgccaccaggcacggccaccggatccccgctcccgctggctcgcgcctcgggggaagctcagactcctaaactcgcactctccgtgctttgcgccgggacccc

SEQ ID NO: 3511 - DNA, 122 bp, Homo sapiens
  misc_feature (61)..(62): /note="This region represents a CpG dinucleotide"
  misc_feature (61)..(61): /note="Nucleotide may be methylated to form 5-methylcytosine"
agtgaaaactggtcctattaggacaaactccaccacatttatttcaggataaatctctgacgctgtggcctccctctttggcatcgatatgctggaatgcaccacagcaagggaggtgatga

SEQ ID NO: 3512 - DNA, 122 bp, Homo sapiens
  misc_feature (61)..(62): /note="This region represents a CpG dinucleotide"
  misc_feature (61)..(61): /note="Nucleotide may be methylated to form 5-methylcytosine"
tcgtgacagtgagttatcgcgagatctgatggtttcgtaagtgttcggtagttcctcctgcgttcattttccttcctcccatcttgtgaagaaggtgctttgctttctcctcaccttgtgtc

SEQ ID NO: 3513 - DNA, 122 bp, Homo sapiens
  misc_feature (61)..(62): /note="This region represents a CpG dinucleotide"
  misc_feature (61)..(61): /note="Nucleotide may be methylated to form 5-methylcytosine"
gcactcagaagaaactgactgaatgaacgtgtgatttatgacgatatacattcacctgagcgaatgctcagagaatacaattagaagcaaactggttaagggagacagtagtgtaaaggaaa

SEQ ID NO: 3514 - DNA, 122 bp, Homo sapiens
  misc_feature (61)..(62): /note="This region represents a CpG dinucleotide"
  misc_feature (61)..(61): /note="Nucleotide may be methylated to form 5-methylcytosine"
gtaccgactgcccaagagctggcagtagttttgtactctgagcctgagcgtgtggccccacgttccatgaggcctttggccggtttgtttgccagagtgtctctgagaggagggagaatgtt

SEQ ID NO: 3515 - DNA, 122 bp, Homo sapiens
  misc_feature (61)..(62): /note="This region represents a CpG dinucleotide"
  misc_feature (61)..(61): /note="Nucleotide may be methylated to form 5-methylcytosine"
acaaatgtatgtcaaatgaatgaatgaatgaaaatgctagaaaatacgaagcagatgcaccgaggaaatgtttctttgaagtatcggatataatggaatctgagagcctcgtggcaatcagc

SEQ ID NO: 3516 - DNA, 122 bp, Homo sapiens
  misc_feature (61)..(62): /note="This region represents a CpG dinucleotide"
  misc_feature (61)..(61): /note="Nucleotide may be methylated to form 5-methylcytosine"
cacatgcttgtctcacatattcctcatctgtgtttacctttgccatttcaatttcagttacgtgcggtatatctgaaggcctaatccttgaattttctctttaaaagattgaacttgaagat

SEQ ID NO: 3517 - DNA, 122 bp, Homo sapiens
  misc_feature (61)..(62): /note="This region represents a CpG dinucleotide"
  misc_feature (61)..(61): /note="Nucleotide may be methylated to form 5-methylcytosine"
tcactatgtgtgtgggtaaagccaggaggcctcgctgccagagcagtgtgctgggaacaacggctgagcatatgtacatgaactaaaaaacactgtagctgtgagctttgtgtgtgagtcac

SEQ ID NO: 3518 - DNA, 122 bp, Homo sapiens
  misc_feature (61)..(62): /note="This region represents a CpG dinucleotide"
  misc_feature (61)..(61): /note="Nucleotide may be methylated to form 5-methylcytosine"
cctgtgtatatttaagcgagagtttgatgaaagcaattcccagacttcagaaacatcctccggaaacagcagccaagaagggccaagtaatgtaccaggttagtgattcagaatggaatttc

SEQ ID NO: 3519 - DNA, 122 bp, Homo sapiens
  misc_feature (61)..(62): /note="This region represents a CpG dinucleotide"
  misc_feature (61)..(61): /note="Nucleotide may be methylated to form 5-methylcytosine"
ggtgaacacagggaactgcaggcaacaatgctgctgaatacacccgagtgcacagtcagacgtgttccgtaaacggtaaatgtgtaagaccaattatcttgagagggtatcttgctccagaa

SEQ ID NO: 3520 - DNA, 122 bp, Homo sapiens
  misc_feature (61)..(62): /note="This region represents a CpG dinucleotide"
  misc_feature (61)..(61): /note="Nucleotide may be methylated to form 5-methylcytosine"
tcttacacgcctacgctatatggtacaggctgttgtttgctcctaggctacaaacctgtacggcaagtgaccatactgaatactgcaagcaattgtaacacaatggtaaatatttgtgtatc

SEQ ID NO: 3521 - DNA, 122 bp, Homo sapiens
  misc_feature (61)..(62): /note="This region represents a CpG dinucleotide"
  misc_feature (61)..(61): /note="Nucleotide may be methylated to form 5-methylcytosine"
cttcccccagctgcaagagtttgcaaaaacattgggcgtctcatttggcgagcgttttggcgcggacagaggccgaggccggccggggaagccggacccgggccctggcgccgccgtggcct

SEQ ID NO: 3522 - DNA, 122 bp, Homo sapiens
  misc_feature (61)..(62): /note="This region represents a CpG dinucleotide"
  misc_feature (61)..(61): /note="Nucleotide may be methylated to form 5-methylcytosine"
atgtctttgacatctgcttaccagcataaattagcagagaagctcactatcctgaatgatcgcggtcagggggttctcatccgtatgtataacatcaagaaggtaagcatgaacaatgggac

SEQ ID NO: 3523 - DNA, 122 bp, Homo sapiens
  misc_feature (61)..(62): /note="This region represents a CpG dinucleotide"
  misc_feature (61)..(61): /note="Nucleotide may be methylated to form 5-methylcytosine"
ccagctttctcactcagcctgctgcacgtgttggatggggctgggtgttgagacttgtcccgcccatctctcggtggggaatcaggatcccatcaaggtaaatcagtgcctgaagatgtggc

SEQ ID NO: 3524 - DNA, 122 bp, Homo sapiens
  misc_feature (61)..(62): /note="This region represents a CpG dinucleotide"
  misc_feature (61)..(61): /note="Nucleotide may be methylated to form 5-methylcytosine"
gaaaagcccattaaaaagaaaaaagcctgcaatcaagtgtgccaccacttcaatgcctggcgcctatgcttggatcatctgctctggcacctgcagttacttctgtgtccctcccacaatct

SEQ ID NO: 3525 - DNA, 122 bp, Homo sapiens
  misc_feature (61)..(62): /note="This region represents a CpG dinucleotide"
  misc_feature (61)..(61): /note="Nucleotide may be methylated to form 5-methylcytosine"
ctattaatgaacatcctctaagctgcacttaagccaaatcccaagggataattagggatacggaacaatgatacaatgtagattgccagtttgcttgaagctcccaacatccaattagaggg

SEQ ID NO: 3526 - DNA, 122 bp, Homo sapiens
  misc_feature (61)..(62): /note="This region represents a CpG dinucleotide"
  misc_feature (61)..(61): /note="Nucleotide may be methylated to form 5-methylcytosine"
tgccccatgagggcccaaatgagggaactggtatgatattcacagagaggtgacatcacccgctgaagatcacacagcaagtccctgggccacctggatcccggccacagctccaccctgct

SEQ ID NO: 3527 - DNA, 122 bp, Homo sapiens
  misc_feature (61)..(62): /note="This region represents a CpG dinucleotide"
  misc_feature (61)..(61): /note="Nucleotide may be methylated to form 5-methylcytosine"
aagaggaagaacagaaatctacagaggcacatagatacatagaaacagctattggctgtccggctgcagcttctgctagggccttcttttcttttttttttttctttctttttttttttttt

SEQ ID NO: 3528 - DNA, 122 bp, Homo sapiens
  misc_feature (61)..(62): /note="This region represents a CpG dinucleotide"
  misc_feature (61)..(61): /note="Nucleotide may be methylated to form 5-methylcytosine"
tcaatagatgctggtatagtctgaatgtttatactgctttttccccccaccaaatccatacgttgaaatcctaaccgccccaaagtgatgttattaggaggtagggcctttggaaggtgatt

SEQ ID NO: 3529 - DNA, 122 bp, Homo sapiens
  misc_feature (61)..(62): /note="This region represents a CpG dinucleotide"
  misc_feature (61)..(61): /note="Nucleotide may be methylated to form 5-methylcytosine"
agaactgcagagagacctgttgctcctagctgggctcttaatgccaaacaaaagaagcaacgtgtcagtaattcagttggtggatgccttggagccattcaagatgcattttgctcattagc

SEQ ID NO: 3530 - DNA, 122 bp, Homo sapiens
  misc_feature (61)..(62): /note="This region represents a CpG dinucleotide"
  misc_feature (61)..(61): /note="Nucleotide may be methylated to form 5-methylcytosine"
cctctgtcttcccagaatgccatgcccagtctcatctttgatcgggtaaaacccaggctacggaggcactttgtaaattgtaaagtactttacagacttaaaggattaatagagtagtagta

SEQ ID NO: 3531 - DNA, 122 bp, Homo sapiens
  misc_feature (61)..(62): /note="This region represents a CpG dinucleotide"
  misc_feature (61)..(61): /note="Nucleotide may be methylated to form 5-methylcytosine"
aagtgatccaatgcattccatagaagtagcagcatcctaaaaactgaatgacacctacaccgtgaaatattttaaaagaattcccaaaactctgcttcatcaagagtgaattttcagtcaaa

SEQ ID NO: 3532 - DNA, 122 bp, Homo sapiens
  misc_feature (61)..(62): /note="This region represents a CpG dinucleotide"
  misc_feature (61)..(61): /note="Nucleotide may be methylated to form 5-methylcytosine"
atgtacataccagagtgcaggacaacggggacgaccctgtcccctggtggcagagctccgcgattcagaacctcgcagcaggaaggaacttgcctgtgactccacattcagccatgctttca

SEQ ID NO: 3533 - DNA, 122 bp, Homo sapiens
  misc_feature (61)..(62): /note="This region represents a CpG dinucleotide"
  misc_feature (61)..(61): /note="Nucleotide may be methylated to form 5-methylcytosine"
cagaagcgctgccactcactcagcactcaggcctatcctgtactgggaagatttccactgcgacgagattaactgtgactctgcccaaattctggctcttatgaaaatgttttctgaagcac

SEQ ID NO: 3534 - DNA, 122 bp, Homo sapiens
  misc_feature (61)..(62): /note="This region represents a CpG dinucleotide"
  misc_feature (61)..(61): /note="Nucleotide may be methylated to form 5-methylcytosine"
tcacatggtagttctctgttcaactgatggggacctgccaggctgcttcccacgcagccgcgccgtttcacctccccgccaacaccacacgggcctgtttctgcaggtcctcagtgacgcgt

SEQ ID NO: 3535 - DNA, 122 bp, Homo sapiens
  misc_feature (61)..(62): /note="This region represents a CpG dinucleotide"
  misc_feature (61)..(61): /note="Nucleotide may be methylated to form 5-methylcytosine"
ctgagggcggtgagcgagggcgccaaggcacaggtggggcgggagtcgagcgcggaggctcggggggcgggacgcggggcctgggagcggccagggaccgcggcagcgcctcagtgccagcc

SEQ ID NO: 3536 - DNA, 122 bp, Homo sapiens
  misc_feature (61)..(62): /note="This region represents a CpG dinucleotide"
  misc_feature (61)..(61): /note="Nucleotide may be methylated to form 5-methylcytosine"
gaaaaatttctattgcctagtgatgtgtagccatcataatgtagcacaaggcattacttacgtgtttgtggtgattctggtgtaaacagacttactgccagtcatataaaagtgtagctcac

SEQ ID NO: 3537 - DNA, 122 bp, Homo sapiens
  misc_feature (61)..(62): /note="This region represents a CpG dinucleotide"
  misc_feature (61)..(61): /note="Nucleotide may be methylated to form 5-methylcytosine"
cattaggaagtcttgttgtttccaaggtacgcttgttttccaaggaagtgcctcggtggccgtctcatggggcagaaaaagatctgggcttcctaatccgatgtcaaccacagcagcttcaa

SEQ ID NO: 3538 - DNA, 122 bp, Homo sapiens
  misc_feature (61)..(62): /note="This region represents a CpG dinucleotide"
  misc_feature (61)..(61): /note="Nucleotide may be methylated to form 5-methylcytosine"
ctgtttccctatatatacaatggtaataataataatgccctcctcattgaattgtttggacgattaattgggctagtatatgcacaggtcctggcacatagtaaaaacttgataagcttttt

SEQ ID NO: 3539 - DNA, 122 bp, Homo sapiens
  misc_feature (61)..(62): /note="This region represents a CpG dinucleotide"
  misc_feature (61)..(61): /note="Nucleotide may be methylated to form 5-methylcytosine"
aagtaaaaaggtgaaagttctccacttaataagaaaagaaaaaaaattgtatactgaggtcgctaagatctatggtaagaatgaaactatctgtgaaatcatgaagaaggaaaaataaattt

SEQ ID NO: 3540 - DNA, 122 bp, Homo sapiens
  misc_feature (61)..(62): /note="This region represents a CpG dinucleotide"
  misc_feature (61)..(61): /note="Nucleotide may be methylated to form 5-methylcytosine"
gcctcactggccaactgggaaacatccgctgtccaaatattataggacggactattcaaccgcatccctgagctctggtgaaataggcatgcagtataatggaattaacatgattaacagca

SEQ ID NO: 3541 - DNA, 122 bp, Homo sapiens
  misc_feature (61)..(62): /note="This region represents a CpG dinucleotide"
  misc_feature (61)..(61): /note="Nucleotide may be methylated to form 5-methylcytosine"
tcatttcatataaacatttaatgctgaaactccaggttacatctggcgtctaatgatgaacgcagacagatgctcctatccagccatgccctctgccactccgcggggtgctgctttccatt

SEQ ID NO: 3542 - DNA, 122 bp, Homo sapiens
  misc_feature (61)..(62): /note="This region represents a CpG dinucleotide"
  misc_feature (61)..(61): /note="Nucleotide may be methylated to form 5-methylcytosine"
tcagagatgcattctaaagggtcttctctattgctttttctcccaaatttaaacttaattcggtttgtctgtgtgcatttgcgtgaagaagtgaactgttgttttcatacgttaatgacagt

SEQ ID NO: 3543 - DNA, 122 bp, Homo sapiens
  misc_feature (61)..(62): /note="This region represents a CpG dinucleotide"
  misc_feature (61)..(61): /note="Nucleotide may be methylated to form 5-methylcytosine"
gaaatgcattactagactcactaacaaccatatgagacgatgtgattttcatgacaaagccgatgaactctccctggttctgctcagcagaaggatggagacagaacattccaccccgtatg

SEQ ID NO: 3544 - DNA, 122 bp, Homo sapiens
  misc_feature (61)..(62): /note="This region represents a CpG dinucleotide"
  misc_feature (61)..(61): /note="Nucleotide may be methylated to form 5-methylcytosine"
tcatgtacacattcagccaagctgctctttctcatcatattctggagtctttttcaaagccgtgagtcagagaatctggagaaattgtagtaaaggtgaaacttgtctactctgtttagtag

SEQ ID NO: 3545 - DNA, 122 bp, Homo sapiens
  misc_feature (61)..(62): /note="This region represents a CpG dinucleotide"
  misc_feature (61)..(61): /note="Nucleotide may be methylated to form 5-methylcytosine"
ttccccagaaaacaccaaggctgtgggagagcagccacctcccccggaagcctacaccgacgccccactcagatgctgcctctatttttagcgggggcagaagtggggactgggggtgggct

SEQ ID NO: 3546 - DNA, 122 bp, Homo sapiens
  misc_feature (61)..(62): /note="This region represents a CpG dinucleotide"
  misc_feature (61)..(61): /note="Nucleotide may be methylated to form 5-methylcytosine"
tccacccaggaagctctagtagcagtgaatttcacattgccctgactaatagcagctctgcgccagaaaccatattcagtcccattaccttgttgaatcctcaagtttgatgactttgtcta

SEQ ID NO: 3547 - DNA, 122 bp, Homo sapiens
  misc_feature (61)..(62): /note="This region represents a CpG dinucleotide"
  misc_feature (61)..(61): /note="Nucleotide may be methylated to form 5-methylcytosine"
aagtaaacaagtcaggcacttacacaattcagtatactgactgtgttgtgcaactatcgccgctgcctagttccagaaccttttcattgtcccaaaaggaatccctgtccccatgagcagtt

SEQ ID NO: 3548 - DNA, 122 bp, Homo sapiens
  misc_feature (61)..(62): /note="This region represents a CpG dinucleotide"
  misc_feature (61)..(61): /note="Nucleotide may be methylated to form 5-methylcytosine"
agggcctctaaacacacattggttcaccattattgccttgttgacgaagcatagttttcccgtttctctttttccctgaatctgttacccaccaccccccttcgattattaccaaatcagaa

SEQ ID NO: 3549 - DNA, 122 bp, Homo sapiens
  misc_feature (61)..(62): /note="This region represents a CpG dinucleotide"
  misc_feature (61)..(61): /note="Nucleotide may be methylated to form 5-methylcytosine"
gggctcccgtggatgctggtaccactcttccttaatctgggtgctggttactcaacgtttcgtgaaaattcacgtatctgtacactaatgagttatacatttttccgtatatatgtcatact

SEQ ID NO: 3550 - DNA, 122 bp, Homo sapiens
  misc_feature (61)..(62): /note="This region represents a CpG dinucleotide"
  misc_feature (61)..(61): /note="Nucleotide may be methylated to form 5-methylcytosine"
tctctaaccccatactctgattcatctactaggagcgggaacgcagaagagataagtgagcgggaaggaagttgcattcagaagatacaacacatagacataagcactctgattcaatagaa

SEQ ID NO: 3551 - DNA, 122 bp, Homo sapiens
  misc_feature (61)..(62): /note="This region represents a CpG dinucleotide"
  misc_feature (61)..(61): /note="Nucleotide may be methylated to form 5-methylcytosine"
ggtccctttttgtgatatgagcatgagaagcacctgtaggcctagtaaaaattcctcatacgagagagatggttagtccagagtaagagaaagctactaagactgaactatatccattcaac

SEQ ID NO: 3552 - DNA, 122 bp, Homo sapiens
  misc_feature (61)..(62): /note="This region represents a CpG dinucleotide"
  misc_feature (61)..(61): /note="Nucleotide may be methylated to form 5-methylcytosine"
atttgcaagaggtgccagtagcgtggctcagtccaagtctgcaagcctcagaaccagggacgccactgggataattctcagtccaaggctgaagagcctagagttttgatatccaaagggca

SEQ ID NO: 3553 - DNA, 122 bp, Homo sapiens
  misc_feature (61)..(62): /note="This region represents a CpG dinucleotide"
  misc_feature (61)..(61): /note="Nucleotide may be methylated to form 5-methylcytosine"
tgcgttcccggcactgagccaggtccacaacaagcactcagaagaaactgactgaatgaacgtgtgatttatgacgatatacattcacctgagcgaatgctcagagaatacaattagaagca

SEQ ID NO: 3554 - DNA, 122 bp, Homo sapiens
  misc_feature (61)..(62): /note="This region represents a CpG dinucleotide"
  misc_feature (61)..(61): /note="Nucleotide may be methylated to form 5-methylcytosine"
ttctgagtcaccaacctgcagatgtcacaaggaggcctgtggtgccaccggaaggaagcacgctgacacacacatgcacagggtctgccctgtgacaaccaggcaaggactccttctgtctt

SEQ ID NO: 3555 - DNA, 122 bp, Homo sapiens
  misc_feature (61)..(62): /note="This region represents a CpG dinucleotide"
  misc_feature (61)..(61): /note="Nucleotide may be methylated to form 5-methylcytosine"
ctacattcccattttatggttttactttttaaaacaacagtatctcatataaacaaactgcggagcatgtaaatgcagactgtgttatttcaggggaagtgattttatttaaatctttttat

SEQ ID NO: 3556 - DNA, 122 bp, Homo sapiens
  misc_feature (61)..(62): /note="This region represents a CpG dinucleotide"
  misc_feature (61)..(61): /note="Nucleotide may be methylated to form 5-methylcytosine"
tggcaagatctcggctttcctgtttctagactcataggtttctttgaatattcctgcaaacgtttcgacaaagggccagatagtaaatgttttattaggcttttcaagccctacaatccctg

SEQ ID NO: 3557 - DNA, 122 bp, Homo sapiens
  misc_feature (61)..(62): /note="This region represents a CpG dinucleotide"
  misc_feature (61)..(61): /note="Nucleotide may be methylated to form 5-methylcytosine"
ggggaagaggcgcccgggcagtgggcggggcctgggcgtggggcggagtcgaggtcggggcggggaggtaaaggcggggccagggaggtgtggtgggcgtggtctggggcgggaggagacag

SEQ ID NO: 3558 - DNA, 122 bp, Homo sapiens
  misc_feature (61)..(62): /note="This region represents a CpG dinucleotide"
  misc_feature (61)..(61): /note="Nucleotide may be methylated to form 5-methylcytosine"
ggtcatttgttttcattgccaccacaatttcagacattaataaaatatgcagccatcttccgtttattgccagtaacttaaaaaatccagtgtatatacttggcactatactaaattaatga

SEQ ID NO: 3559 - DNA, 122 bp, Homo sapiens
  misc_feature (61)..(62): /note="This region represents a CpG dinucleotide"
  misc_feature (61)..(61): /note="Nucleotide may be methylated to form 5-methylcytosine"
ctggcttcaagactctgtgagaagacagcagtgcttggagtgctggattctggccacttccgcaggctccactgacttataaagcctgcagataacaggaattactggatttctccttgcaa

SEQ ID NO: 3560 - DNA, 122 bp, Homo sapiens
  misc_feature (61)..(62): /note="This region represents a CpG dinucleotide"
  misc_feature (61)..(61): /note="Nucleotide may be methylated to form 5-methylcytosine"
acaagtatgatgcacttagggaacacaaaataatttttattaccttaatccagacaattacgagaagataaatctgctacaaaatgccataattcactcgctccctcacacatgcgtaacac

SEQ ID NO: 3561 - DNA, 122 bp, Homo sapiens
  misc_feature (61)..(62): /note="This region represents a CpG dinucleotide"
  misc_feature (61)..(61): /note="Nucleotide may be methylated to form 5-methylcytosine"
agaaggcacaaaacacagaaatgggggttctcacactacagattaaggagtgtcccaggccgggcacggtggctcacacctgtaatcccagcactttgggaggctgaggcaggtggatcacc

SEQ ID NO: 3562 - DNA, 122 bp, Homo sapiens
  misc_feature (61)..(62): /note="This region represents a CpG dinucleotide"
  misc_feature (61)..(61): /note="Nucleotide may be methylated to form 5-methylcytosine"
tgagaaaacaggaagcgcccagtcaccacaggaagcatgtgtgcgccgcctccccacccccggcccattgcaaaacgccaacagcccattaccacaggcaccgcacagcggcccagagaaac

SEQ ID NO: 3563 - DNA, 122 bp, Homo sapiens
  misc_feature (61)..(62): /note="This region represents a CpG dinucleotide"
  misc_feature (61)..(61): /note="Nucleotide may be methylated to form 5-methylcytosine"
atgcccattgtactcaatcttcctgacaactcattattccatactgaagaaatggcttctcgaagcaaaacctgctctttcaagatcataaaattccccatatcatttgagttaaaatgaaa

SEQ ID NO: 3564 - DNA, 122 bp, Homo sapiens
  misc_feature (61)..(62): /note="This region represents a CpG dinucleotide"
  misc_feature (61)..(61): /note="Nucleotide may be methylated to form 5-methylcytosine"
tgatacacagtgacccagaccgatagaactcatgaattaaaaacaaatgttaatccatttcggcttcatttctatccccgagatttcctaatggttttgtttcccaatccatttgaacaaaa

SEQ ID NO: 3565 - DNA, 122 bp, Homo sapiens
  misc_feature (61)..(62): /note="This region represents a CpG dinucleotide"
  misc_feature (61)..(61): /note="Nucleotide may be methylated to form 5-methylcytosine"
cagaccttggcggtgagtgttacagctcaagccggcacatctggagttgtttgttcctcccggtgggttcgtggtctcggtgacttcaggagtgaagctgcaaatcttcgctgtgagtgtta

SEQ ID NO: 3566 - DNA, 122 bp, Homo sapiens
  misc_feature (61)..(62): /note="This region represents a CpG dinucleotide"
  misc_feature (61)..(61): /note="Nucleotide may be methylated to form 5-methylcytosine"
ttggactgtcatctcacatattgctttattaacctgggcagtgatttcgatcttctctcccgctgtcattcttccgtgagcaaggacaccttgcttctagatcacctcctgaattgccacac

SEQ ID NO: 3567 - DNA, 122 bp, Homo sapiens
  misc_feature (61)..(62): /note="This region represents a CpG dinucleotide"
  misc_feature (61)..(61): /note="Nucleotide may be methylated to form 5-methylcytosine"
atggggcagcttccacatgcttgcctccccctatttgttcctggaaactgtctctcatcacgaggcaccaaaatgaaccagcctagatttctgagaataaagcatgtatatctgatcctggg

SEQ ID NO: 3568 - DNA, 122 bp, Homo sapiens
  misc_feature (61)..(62): /note="This region represents a CpG dinucleotide"
  misc_feature (61)..(61): /note="Nucleotide may be methylated to form 5-methylcytosine"
ataataatcgtataacccagttcttacatactaaaatgtgccatccaaacagtccaatgtcgtaaaatttggttataagaaaaatgtgccagggcatttctttccttgctaattctctgtct

SEQ ID NO: 3569 - DNA, 122 bp, Homo sapiens
  misc_feature (61)..(62): /note="This region represents a CpG dinucleotide"
  misc_feature (61)..(61): /note="Nucleotide may be methylated to form 5-methylcytosine"
aactttgtaataactttgacggagagcaaattttcctgggcacaatcaagatggggaaggcgtaaaggggaagtacagatatgagcacataagccacagcagtcgggaaggggcggagtcca

SEQ ID NO: 3570 - DNA, 122 bp, Homo sapiens
  misc_feature (61)..(62): /note="This region represents a CpG dinucleotide"
  misc_feature (61)..(61): /note="Nucleotide may be methylated to form 5-methylcytosine"
tccttctcaaggcaaagtgccatatttgtcatagtactcatacatttcttaaccagttaacgtgtaaaattaggccactgtttttattaggttcctatctttcttttaatgtgtcagtgact

SEQ ID NO: 3571 - DNA, 122 bp, Homo sapiens
  misc_feature (61)..(62): /note="This region represents a CpG dinucleotide"
  misc_feature (61)..(61): /note="Nucleotide may be methylated to form 5-methylcytosine"
cgtacaacccacatggctgcacattaactgggctttgtggtcccctcggagggctgttggcgcctggtcctcagtggagctggtttatgatggtggcagccttgctgcacctttccgggttt

SEQ ID NO: 3572 - DNA, 122 bp, Homo sapiens
  misc_feature (61)..(62): /note="This region represents a CpG dinucleotide"
  misc_feature (61)..(61): /note="Nucleotide may be methylated to form 5-methylcytosine"
agaccctggacccctcaatgacaaggaacacagtcccccgaaatcctggaaaagccatcccgttactggacagagaaattaacatctgtctctgctgcgtcctctcgggtgtctgtgacggt

SEQ ID NO: 3573 - DNA, 122 bp, Homo sapiens
  misc_feature (61)..(62): /note="This region represents a CpG dinucleotide"
  misc_feature (61)..(61): /note="Nucleotide may be methylated to form 5-methylcytosine"
ccagagcaagcaagcactgcattcaaggaattacaagtagccgcctgtagatcagctgagcgttgacaagccagaaactcatctttgagcttttctgtcttggaaatatgaactcagcccaa

SEQ ID NO: 3574 - DNA, 122 bp, Homo sapiens
  misc_feature (61)..(62): /note="This region represents a CpG dinucleotide"
  misc_feature (61)..(61): /note="Nucleotide may be methylated to form 5-methylcytosine"
taaagctatctagaagctcctcagcctaatgttatctcattaacatgaaaaagacacttacgtagatttcaagggttttaggagctttgtgctaagaacctaggacaaagaccagttatttt

SEQ ID NO: 3575 - DNA, 122 bp, Homo sapiens
  misc_feature (61)..(62): /note="This region represents a CpG dinucleotide"
  misc_feature (61)..(61): /note="Nucleotide may be methylated to form 5-methylcytosine"
gttatataaccgttccccttggcttacaatcaaacttccagattagctggaggtgccctgcgcaagttaggagttggtgtgggggtgagccacgtgaccgagcctggcttcctggttggggc

SEQ ID NO: 3576 - DNA, 122 bp, Homo sapiens
  misc_feature (61)..(62): /note="This region represents a CpG dinucleotide"
  misc_feature (61)..(61): /note="Nucleotide may be methylated to form 5-methylcytosine"
ccagatcccggacatataaaccacgccaagaagacaggggctgtctctagcacattctctcgagggagtccggggccccttcccagacgcaactgcaaaaggaagggctaacgccatggcgg

SEQ ID NO: 3577 - DNA, 122 bp, Homo sapiens
  misc_feature (61)..(62): /note="This region represents a CpG dinucleotide"
  misc_feature (61)..(61): /note="Nucleotide may be methylated to form 5-methylcytosine"
tatccctagcactggggtaaatcctgactggtttcagctagtcacatgggtcccattctccgtaggtgatgactgtaggggtgagccagagacctagttctggtcagtgagattagtgggag

SEQ ID NO: 3578 - DNA, 122 bp, Homo sapiens
  misc_feature (61)..(62): /note="This region represents a CpG dinucleotide"
  misc_feature (61)..(61): /note="Nucleotide may be methylated to form 5-methylcytosine"
agacctgcccctccttcagaggcagcttagccagaaacgccagcggcagagacaactgtgcgggtggggatgctgagcgcagagccggcagagcccgcgggcaggcagagaagcaccacaca

SEQ ID NO: 3579 - DNA, 122 bp, Homo sapiens
  misc_feature (61)..(62): /note="This region represents a CpG dinucleotide"
  misc_feature (61)..(61): /note="Nucleotide may be methylated to form 5-methylcytosine"
acattttaagtctggcgcagtgactcacgcctgtaatcctggcactttgggatgccaagacggttggatcctttgagcccgggagttccaaaccagcctgagcaacatggtgaaaccccttc

SEQ ID NO: 3580 - DNA, 122 bp, Homo sapiens
  misc_feature (61)..(62): /note="This region represents a CpG dinucleotide"
  misc_feature (61)..(61): /note="Nucleotide may be methylated to form 5-methylcytosine"
agtgtgcttagactataaagtgatgtggctgcttctccatgaagctcatagaatcagtcacgtctacgtcctgacacttccatggtgaacaagttgagggacagggagagctccaatgccta

SEQ ID NO: 3581 - DNA, 122 bp, Homo sapiens
  misc_feature (61)..(62): /note="This region represents a CpG dinucleotide"
  misc_feature (61)..(61): /note="Nucleotide may be methylated to form 5-methylcytosine"
ccccttggttcacctatttaacagattgaaactccaatcttcacagtgagaggaaggagacgggggaggaatctatctgcttctgtcttagtcaccttgggctgccatagcaaaataccata

SEQ ID NO: 3582 - DNA, 122 bp, Homo sapiens
  misc_feature (61)..(62): /note="This region represents a CpG dinucleotide"
  misc_feature (61)..(61): /note="Nucleotide may be methylated to form 5-methylcytosine"
ggttaaaaggcatcttttggcatcgctcaggttctgaggcattagcaaaataatagcactcggcttgtccattgaaactgacagagtctatatacagcaagccctttacaaggcagtcaagt

SEQ ID NO: 3583 - DNA, 122 bp, Homo sapiens
  misc_feature (61)..(62): /note="This region represents a CpG dinucleotide"
  misc_feature (61)..(61): /note="Nucleotide may be methylated to form 5-methylcytosine"
gctatcattagtcccatctttcagataaagaacctgtatctcagtgtgggtaagtgccaacgtcatagaattttttagttgcagaacttggacatagcctacgtctatcctgccctgcagcc

SEQ ID NO: 3584 - DNA, 122 bp, Homo sapiens
  misc_feature (61)..(62): /note="This region represents a CpG dinucleotide"
  misc_feature (61)..(61): /note="Nucleotide may be methylated to form 5-methylcytosine"
gaagccaggtacatgaccttggaaaactggtctctcatctatatgacaagtctaccatcccgcctcacagggtgcttgcaggtcagagggtaggtttgtggacatcacagtagagaagaacg

SEQ ID NO: 3585 - DNA, 122 bp, Homo sapiens
  misc_feature (61)..(62): /note="This region represents a CpG dinucleotide"
  misc_feature (61)..(61): /note="Nucleotide may be methylated to form 5-methylcytosine"
ctaggcacagactcaacagaaatgcctgcatatagtcaccaaaaggcatgttcatagtagcgttattcatggtagtcaaaaactgaaaacaacccgaatgtccattaaaaaaggatggatga

SEQ ID NO: 3586 - DNA, 122 bp, Homo sapiens
  misc_feature (61)..(62): /note="This region represents a CpG dinucleotide"
  misc_feature (61)..(61): /note="Nucleotide may be methylated to form 5-methylcytosine"
gccacaagatcagatgagccagtttataaatctgggtggggccagctgactcatcaagtgcggagtctgcaaaatatgtcaagcactgatcttaggagcagtttaggacaggtcagaatctt

SEQ ID NO: 3587 - DNA, 122 bp, Homo sapiens
  misc_feature (61)..(62): /note="This region represents a CpG dinucleotide"
  misc_feature (61)..(61): /note="Nucleotide may be methylated to form 5-methylcytosine"
gcccgcaccccagagaataaactccggttcacgatcctggcctctgtaaaatctctggtccgttattacacttctacctgccctagttaagcagattaacagttatttcctagaatttgatc

SEQ ID NO: 3588 - DNA, 122 bp, Homo sapiens
  misc_feature (61)..(62): /note="This region represents a CpG dinucleotide"
  misc_feature (61)..(61): /note="Nucleotide may be methylated to form 5-methylcytosine"
tatccctgccatgtgccacacggcactaactgatgataaataaattccctgtgcgctgcccggacagactctacggtcagaaacacgaaaagcagctagcacagatcaaagataaagaagac

SEQ ID NO: 3589 - DNA, 122 bp, Homo sapiens
  misc_feature (61)..(62): /note="This region represents a CpG dinucleotide"
  misc_feature (61)..(61): /note="Nucleotide may be methylated to form 5-methylcytosine"
ccaaagcctgaatcacaaggtttttgaatagttatgaacaaatacagagtagcagaaggacgaggctgagaaatgaaagccaggggtctgaatcccagctttgtcactaactcccagttcct

SEQ ID NO: 3590 - DNA, 122 bp, Homo sapiens
  misc_feature (61)..(62): /note="This region represents a CpG dinucleotide"
  misc_feature (61)..(61): /note="Nucleotide may be methylated to form 5-methylcytosine"
tggtatgaatgacaggcacattatttctaatcctttttattggttctgtcccaggccttgcgtagtttctttgcatgcatgcaccggtcagtactcagctgaatattaaaggaggttctctg

SEQ ID NO: 3591 - DNA, 122 bp, Homo sapiens
  misc_feature (61)..(62): /note="This region represents a CpG dinucleotide"
  misc_feature (61)..(61): /note="Nucleotide may be methylated to form 5-methylcytosine"
ttccccaggcactgcttagctccgtatactggtctcccaggaggcagagccaatctctagcgcctattctgtgaggcagggttgcaccaccagctagtacagccttaaaagtcactccccaa

SEQ ID NO: 3592 - DNA, 122 bp, Homo sapiens
  misc_feature (61)..(62): /note="This region represents a CpG dinucleotide"
  misc_feature (61)..(61): /note="Nucleotide may be methylated to form 5-methylcytosine"
atgccaagaaattgctgctctgaagtcattaacaggccaccgctttttctctttatgagacgacacaggatgggatggatggatttgatcacactacatatgccttcaataatctcaactgg

SEQ ID NO: 3593 - DNA, 122 bp, Homo sapiens
  misc_feature (61)..(62): /note="This region represents a CpG dinucleotide"
  misc_feature (61)..(61): /note="Nucleotide may be methylated to form 5-methylcytosine"
accagacggtctggaaaatcccgaagcagaagcccgtattcatctaggcattcaagatctcgtagcaggcacagattgtctagatccagaagtcgtcattctagtatttctcctagcacact

SEQ ID NO: 3594 - DNA, 122 bp, Homo sapiens
  misc_feature (61)..(62): /note="This region represents a CpG dinucleotide"
  misc_feature (61)..(61): /note="Nucleotide may be methylated to form 5-methylcytosine"
gtgtcagaacattatgaacagcccgaagatgggctgtgagcggggataagtgaagcgcggcgtggaggccgttcggtaactccatccatctgtggacaggggcgtgaggacaaggcgaacag

SEQ ID NO: 3595 - DNA, 122 bp, Homo sapiens
  misc_feature (61)..(62): /note="This region represents a CpG dinucleotide"
  misc_feature (61)..(61): /note="Nucleotide may be methylated to form 5-methylcytosine"
aagctaagtaagcaatgtgctttccagacgcctattaatgttgctgaattatactcaaagcgggctttatatttgttaataaagtagaagagtgtgaaataggagcagagaacatgtcagta

SEQ ID NO: 3596 - DNA, 122 bp, Homo sapiens
  misc_feature (61)..(62): /note="This region represents a CpG dinucleotide"
  misc_feature (61)..(61): /note="Nucleotide may be methylated to form 5-methylcytosine"
tctgacccctgctcagcgcgcgccatttcgtcgttgccaaacgaaatcaagccccgcgtgcgctccaggggcgaaggactctggactcaccccgaccaccgggagagctggcccctacccac

SEQ ID NO: 3597 - DNA, 122 bp, Homo sapiens
  misc_feature (61)..(62): /note="This region represents a CpG dinucleotide"
  misc_feature (61)..(61): /note="Nucleotide may be methylated to form 5-methylcytosine"
ataagaacttaacttgatttgagtcctaattattctatttattatgtaaaaaccctcattcgtgtttcatgaacgtaatcatcagctatcccatttcatagactgaaatctctgtgctatgt

SEQ ID NO: 3598 - DNA, 122 bp, Homo sapiens
  misc_feature (61)..(62): /note="This region represents a CpG dinucleotide"
  misc_feature (61)..(61): /note="Nucleotide may be methylated to form 5-methylcytosine"
taggggcagcactgggtgaaggctgcttgtaggaaaggcccataagggaggcaggagggacgggagcaggggatgagggcagaggacaccctacaaatggatcagagaactgcagatagaaa

SEQ ID NO: 3599 - DNA, 122 bp, Homo sapiens
  misc_feature (61)..(62): /note="This region represents a CpG dinucleotide"
  misc_feature (61)..(61): /note="Nucleotide may be methylated to form 5-methylcytosine"
ctcccatgaattaagaggcaaacgtgctccaaagtgcattaacctttatggattttttttcggttttcatgttccactgatttatggtcttaaatatgcctgttgctgctgtttctgaatga

SEQ ID NO: 3600 - DNA, 122 bp, Homo sapiens
  misc_feature (61)..(62): /note="This region represents a CpG dinucleotide"
  misc_feature (61)..(61): /note="Nucleotide may be methylated to form 5-methylcytosine"
ggagtttaaaggcaagaaggctagggtcacggagcaactgctatgggaaaggtgagccagcgcgacagcccccaccccagaagaggcccggggcaaggggatgcctgcagcttggctggtat

SEQ ID NO: 3601 - DNA, 122 bp, Homo sapiens
  misc_feature (61)..(62): /note="This region represents a CpG dinucleotide"
  misc_feature (61)..(61): /note="Nucleotide may be methylated to form 5-methylcytosine"
ctgcttttgcaccacggtaaagtcgaaaaatcctgagtcaaaccaccataaatcagggaccgtctgtaattgtcagcttatgacttgtaagttctaggtttcatagctcaaggctggaagcc

SEQ ID NO: 3602 - DNA, 122 bp, Homo sapiens
  misc_feature (61)..(62): /note="This region represents a CpG dinucleotide"
  misc_feature (61)..(61): /note="Nucleotide may be methylated to form 5-methylcytosine"
gctacatggtgctgccactgtttgcttacttcatccgagactggcggatgctgctggtggcgctgacgatgccgggggtgctatgcgtggcactctggtggtgagtgtgaccttgtgcccca

SEQ ID NO: 3603 - DNA, 122 bp, Homo sapiens
  misc_feature (61)..(62): /note="This region represents a CpG dinucleotide"
  misc_feature (61)..(61): /note="Nucleotide may be methylated to form 5-methylcytosine"
agtaacatctctgtcctgcaggtggcaagaaacatgagtcacagatcacattaatgtattcggtgagtgagatatttcaaagttgggatttatttctaagacatagcactttaggattccaa

SEQ ID NO: 3604 - DNA, 122 bp, Homo sapiens
  misc_feature (61)..(62): /note="This region represents a CpG dinucleotide"
  misc_feature (61)..(61): /note="Nucleotide may be methylated to form 5-methylcytosine"
gcacaatatactctcattcactgtccccataaaatctgcaggcagagaaacagctacagtcggatatgttcccgctctgggttaagaaatggaatactgaagttgaatcttggtggaagtgg

SEQ ID NO: 3605 - DNA, 122 bp, Homo sapiens
  misc_feature (61)..(62): /note="This region represents a CpG dinucleotide"
  misc_feature (61)..(61): /note="Nucleotide may be methylated to form 5-methylcytosine"
tctggtacagagcaatctgacactggaggagagccccacaagacgatcatccgcttcacacgctcctgcgacgaggcaggcaagaagcacagaatcttgaattctcacacaacgcccatggg

SEQ ID NO: 3606 - DNA, 122 bp, Homo sapiens
  misc_feature (61)..(62): /note="This region represents a CpG dinucleotide"
  misc_feature (61)..(61): /note="Nucleotide may be methylated to form 5-methylcytosine"
aagcaggtttgctgtgcgctggtgaccaaactgagttaggaaagacagaacacacacatacgcaacacgtcatagaaagcaggtttattactcacagacaggcaatgagggacaacagaagc

SEQ ID NO: 3607 - DNA, 122 bp, Homo sapiens
  misc_feature (61)..(62): /note="This region represents a CpG dinucleotide"
  misc_feature (61)..(61): /note="Nucleotide may be methylated to form 5-methylcytosine"
aaacttgttctaagagtgattaatgtacctggatgtatcactggggtgagccacgggaaccggctagagaagtgcctgatgcaagttcattagaatccagactgcaagttttttagaattca

SEQ ID NO: 3608 - DNA, 122 bp, Homo sapiens
  misc_feature (61)..(62): /note="This region represents a CpG dinucleotide"
  misc_feature (61)..(61): /note="Nucleotide may be methylated to form 5-methylcytosine"
cactggaggagcagacgtggcctccgggagatgctgagccagggctgaggacatgagatgcgcagggagggcagacactcccaccaggtcagaggagagacagggaggccagccctgccaaa

SEQ ID NO: 3609 - DNA, 122 bp, Homo sapiens
  misc_feature (61)..(62): /note="This region represents a CpG dinucleotide"
  misc_feature (61)..(61): /note="Nucleotide may be methylated to form 5-methylcytosine"
acttcagccatgtccaacaccatggtgaataaggatgatcttccagtctccaaatattaccgtggaaagttgtctaaacccaaaattcatggtgatggagtgcaaaagatttcagctcaaga

SEQ ID NO: 3610 - DNA, 122 bp, Homo sapiens
  misc_feature (61)..(62): /note="This region represents a CpG dinucleotide"
  misc_feature (61)..(61): /note="Nucleotide may be methylated to form 5-methylcytosine"
aaaaaagcagccttggagaaatcttcaacccagaaggagttaagctgtgtgtctgcacagcgcagctttgttctggcaaggtcccatcagtttaggtcatttctgatgacttcactctcctg

SEQ ID NO: 3611 - DNA, 122 bp, Homo sapiens
  misc_feature (61)..(62): /note="This region represents a CpG dinucleotide"
  misc_feature (61)..(61): /note="Nucleotide may be methylated to form 5-methylcytosine"
gaattaaatttatttttgttcattgtttttttaaaaaatggcaggagcaaacctgacaagcgctgcctccatcaggtgatcaaagggaacatccagggcactaagtcctgctgatacaccct

SEQ ID NO: 3612 - DNA, 122 bp, Homo sapiens
  misc_feature (61)..(62): /note="This region represents a CpG dinucleotide"
  misc_feature (61)..(61): /note="Nucleotide may be methylated to form 5-methylcytosine"
aataggaattgagtttgcaaggttgaggctggagatgaaaaactagagaaagcgtaactacgatagctgaagagacaagaagaattgccaaaggatagtgaaataataataatattcggcta

SEQ ID NO: 3613 - DNA, 122 bp, Homo sapiens
  misc_feature (61)..(62): /note="This region represents a CpG dinucleotide"
  misc_feature (61)..(61): /note="Nucleotide may be methylated to form 5-methylcytosine"
ctgtctctctcgtgcatatgtgtctgtgggtctccctgtgggttctccccagcctctctccgcgccagctcttttaagcatggtgagcctctgcgattgattggctgatctctaagccactc

SEQ ID NO: 3614 - DNA, 122 bp, Homo sapiens
  misc_feature (61)..(62): /note="This region represents a CpG dinucleotide"
  misc_feature (61)..(61): /note="Nucleotide may be methylated to form 5-methylcytosine"
gttctttctgtctcttaagagagtgttcagagcacttgctatttaacttctatcatcgaccgtgtaaaattaggcaaattgcttacctttcctgagtttcagtttcctcaactgttaagtgg

SEQ ID NO: 3615 - DNA, 122 bp, Homo sapiens
  misc_feature (61)..(62): /note="This region represents a CpG dinucleotide"
  misc_feature (61)..(61): /note="Nucleotide may be methylated to form 5-methylcytosine"
ttgtgctcaaaattttttttcctttttcattcccacaagtgacaaaaatgtgcctgatcacgtaagtatctttaggattgtggacaatagtcacacatgaaaagtaagtgaaaaaaaaatcc

SEQ ID NO: 3616 - DNA, 122 bp, Homo sapiens
  misc_feature (61)..(62): /note="This region represents a CpG dinucleotide"
  misc_feature (61)..(61): /note="Nucleotide may be methylated to form 5-methylcytosine"
gcctggctcacccgcttcacacgtcagtttgactcctctccccgccccccaccaatcccccgccctactctccgcgcacccagagccgagagaaatttgactgccctaatcgccaatcaaaa

SEQ ID NO: 3617 - DNA, 122 bp, Homo sapiens
  misc_feature (61)..(62): /note="This region represents a CpG dinucleotide"
  misc_feature (61)..(61): /note="Nucleotide may be methylated to form 5-methylcytosine"
tgccttgcagagtgaggattactgacagaataactgtaaagtcctgacacataggacatacgcaataagttagaactatggtgaagattataaaatgataccgtgtcccaggctctgttatc

SEQ ID NO: 3618 - DNA, 122 bp, Homo sapiens
  misc_feature (61)..(62): /note="This region represents a CpG dinucleotide"
  misc_feature (61)..(61): /note="Nucleotide may be methylated to form 5-methylcytosine"
cagacctagtatttagcagggtaatgggatttatgattttgtttacatcagtctccgtggcgattcaccataaaagatccgttgcttggcaacttggcattgtggggctgcagtggagggtg

SEQ ID NO: 3619 - DNA, 122 bp, Homo sapiens
  misc_feature (61)..(62): /note="This region represents a CpG dinucleotide"
  misc_feature (61)..(61): /note="Nucleotide may be methylated to form 5-methylcytosine"
tatcttgggagatgtctcacacttaagttgagcaaatgatttcccttctcggctttttcacggtggattcacaggcacatggtttctgtctgaatgtgtagaaaacaattatctcatctcat

SEQ ID NO: 3620 - DNA, 122 bp, Homo sapiens
  misc_feature (61)..(62): /note="This region represents a CpG dinucleotide"
  misc_feature (61)..(61): /note="Nucleotide may be methylated to form 5-methylcytosine"
acaagcgtgtcccccattgacaaggagccctattcagactgcaggtgcgaagtgggccggcgcgcccgaccacattatgtcaaggttgttggagattagtgttcagccctaataactaaagc

SEQ ID NO: 3621 - DNA, 122 bp, Homo sapiens
  misc_feature (61)..(62): /note="This region represents a CpG dinucleotide"
  misc_feature (61)..(61): /note="Nucleotide may be methylated to form 5-methylcytosine"
ctgaggaaacagccctcacctggagcatggctggtccctctggcagaaggaaagagagtacggtgagccacatgttggctcagaaaacatcacccaggagtaacaaggcaagtctcatggcc

SEQ ID NO: 3622 - DNA, 122 bp, Homo sapiens
  misc_feature (61)..(62): /note="This region represents a CpG dinucleotide"
  misc_feature (61)..(61): /note="Nucleotide may be methylated to form 5-methylcytosine"
taagaaaaagaggaagcatttgtgtttttctgtagcccagagagccaagaatgactgccacgcgtgacctgaagaagcagaaggataaaaggttgaaacaccaaaagccatgaacagaagtt

SEQ ID NO: 3623 - DNA, 122 bp, Homo sapiens
  misc_feature (61)..(62): /note="This region represents a CpG dinucleotide"
  misc_feature (61)..(61): /note="Nucleotide may be methylated to form 5-methylcytosine"
catagtctgaagacaaaggattcttccgcttgccaaagttccagggagcctaggttgagccgctgtgacagcacttcggcagggagctttttattcagtcttcgatttgccgtcaggcctca

SEQ ID NO: 3624 - DNA, 122 bp, Homo sapiens
  misc_feature (61)..(62): /note="This region represents a CpG dinucleotide"
  misc_feature (61)..(61): /note="Nucleotide may be methylated to form 5-methylcytosine"
cccttctgctctctcccctcacccagagaaatacatggagtttgaccttaatggaaatggcgatattggtgagaaacgggtgatttgcgggggcagggtggtgtgcaggcctaagaagacag

SEQ ID NO: 3625 - DNA, 122 bp, Homo sapiens
  misc_feature (61)..(62): /note="This region represents a CpG dinucleotide"
  misc_feature (61)..(61): /note="Nucleotide may be methylated to form 5-methylcytosine"
tgcgattctctttggtaaataatcaaggaagagagagagtagagagtgaaagagagaaagcgagagacctaagtgacccaacgcacacttaccttcaggcttaggaggtatttacaatcagg

SEQ ID NO: 3626 - DNA, 122 bp, Homo sapiens
  misc_feature (61)..(62): /note="This region represents a CpG dinucleotide"
  misc_feature (61)..(61): /note="Nucleotide may be methylated to form 5-methylcytosine"
agtaggactaacttaaaggccatttagcaaaaattcaccacgcaaggccctatattagggcgctgggggctcatacctcatcgtcccgtcaactctataaagcaggggccaacaaacttttt

SEQ ID NO: 3627 - DNA, 122 bp, Homo sapiens
  misc_feature (61)..(62): /note="This region represents a CpG dinucleotide"
  misc_feature (61)..(61): /note="Nucleotide may be methylated to form 5-methylcytosine"
cttcactttggtttcctcctgccttaaatgggcataccacctggcattaggattaatgtgcgtaaagtacttagaactcagcccaggtgagttctccttaactcagcctagaagagatcatc

SEQ ID NO: 3628 - DNA, 122 bp, Homo sapiens
  misc_feature (61)..(62): /note="This region represents a CpG dinucleotide"
  misc_feature (61)..(61): /note="Nucleotide may be methylated to form 5-methylcytosine"
ctctctaatttacactgctccacccacagtggcctccttgtttcttgaaaacaccaggcacgtttcctgctcagggcttttgcactggctgcttttgcgttggatgctcttatcctcagatg

SEQ ID NO: 3629 - DNA, 122 bp, Homo sapiens
  misc_feature (61)..(62): /note="This region represents a CpG dinucleotide"
  misc_feature (61)..(61): /note="Nucleotide may be methylated to form 5-methylcytosine"
tgatcttgtgatccacccatctgggcctcccacagtgctgggattacaggcatgagccaccgggcccggcctaaagaaacctcttaaggatgggggagattataaaaaacattgatcagtta

SEQ ID NO: 3630 - DNA, 122 bp, Homo sapiens
  misc_feature (61)..(62): /note="This region represents a CpG dinucleotide"
  misc_feature (61)..(61): /note="Nucleotide may be methylated to form 5-methylcytosine"
actgatagcaaatgatcccttggtgaatggggtacaatccaggattgactggaatccttccgttagctctatcattgcctacatgtcacttgtttcttttcccaggaatgagacattggaat

SEQ ID NO: 3631 - DNA, 122 bp, Homo sapiens
  misc_feature (61)..(62): /note="This region represents a CpG dinucleotide"
  misc_feature (61)..(61): /note="Nucleotide may be methylated to form 5-methylcytosine"
ctttaaaaattgttcaaatcaataattatacaaataaatttagaagaaaatcattataaacgaatgtgagaaagtttgttttatgtgaagaaacgaacacagattagtttatgtggacaaat

SEQ ID NO: 3632 - DNA, 122 bp, Homo sapiens
  misc_feature (61)..(62): /note="This region represents a CpG dinucleotide"
  misc_feature (61)..(61): /note="Nucleotide may be methylated to form 5-methylcytosine"
aagtgtagttcctagaccagcagtaccaacatcaccagggaactcagaaatgcagactctcgggctccaccttagatttactgaatcaacattctgggggttggacccaactctccatttaa

SEQ ID NO: 3633 - DNA, 122 bp, Homo sapiens
  misc_feature (61)..(62): /note="This region represents a CpG dinucleotide"
  misc_feature (61)..(61): /note="Nucleotide may be methylated to form 5-methylcytosine"
gcagtttcacttccagatctcaacaatcatcttgtgtagtgtgtttcagccctaactgcacgcaatctgcttgcaagaggcaatgaatatttgctgactgagaagtgcctgatatttctctt

SEQ ID NO: 3634 - DNA, 122 bp, Homo sapiens
  misc_feature (61)..(62): /note="This region represents a CpG dinucleotide"
  misc_feature (61)..(61): /note="Nucleotide may be methylated to form 5-methylcytosine"
ctgaggactcaaaagtgggtatccaaactagctgaagcagctgttccacttctataaacacgtatttttatttaattcttgaaggcagacagccaagttgagacagcattctgcttctgcct

SEQ ID NO: 3635 - DNA, 122 bp, Homo sapiens
  misc_feature (61)..(62): /note="This region represents a CpG dinucleotide"
  misc_feature (61)..(61): /note="Nucleotide may be methylated to form 5-methylcytosine"
cttgaaccatcactcctcttacatagattcacagaccattcttcagaaagtttggaccaacgatgtcaagtttgccattctatctcctgaatgtgtggcaaacatcactagtcagttattga

SEQ ID NO: 3636 - DNA, 122 bp, Homo sapiens
  misc_feature (61)..(62): /note="This region represents a CpG dinucleotide"
  misc_feature (61)..(61): /note="Nucleotide may be methylated to form 5-methylcytosine"
cctcagttgctttgtatacatattacagataccagaataagtgaagaccttgtgtcagaacgctgtaatacatttcgaatggccaagaggaaattctgcagttgagcactgtgcctctgagg

SEQ ID NO: 3637 - DNA, 122 bp, Homo sapiens
  misc_feature (61)..(62): /note="This region represents a CpG dinucleotide"
  misc_feature (61)..(61): /note="Nucleotide may be methylated to form 5-methylcytosine"
atttcaaagctgcataaaaataaaaattatctaataagcaacaaacttaggatatcagagcgatctcatgtgctgtggtgtagtgaacatgatgtacctgcccagcctttcgtagagggaga

SEQ ID NO: 3638 - DNA, 122 bp, Homo sapiens
  misc_feature (61)..(62): /note="This region represents a CpG dinucleotide"
  misc_feature (61)..(61): /note="Nucleotide may be methylated to form 5-methylcytosine"
atataactctattggactgggatccacacctccatcccccacagcagccacagcaagtcccgcccaaggagagggtgagctcagacacacctatccctgcccccacctggtggtctttctct

SEQ ID NO: 3639 - DNA, 122 bp, Homo sapiens
  misc_feature (61)..(62): /note="This region represents a CpG dinucleotide"
  misc_feature (61)..(61): /note="Nucleotide may be methylated to form 5-methylcytosine"
gtggctgccttctcgggagactcaaattctttggatctgcgcacgattcctgggtcccatcggggatgactggaaacccagtcttgacccatctccaggacctctacagaggcctctcaggg

SEQ ID NO: 3640 - DNA, 122 bp, Homo sapiens
  misc_feature (61)..(62): /note="This region represents a CpG dinucleotide"
  misc_feature (61)..(61): /note="Nucleotide may be methylated to form 5-methylcytosine"
ttgtctccatgtgtctgaagggtacttccccatcatcattttcattcatcctaagaaaggcggctccctgtgtggaggtggtggccgcgaacattttggctgaactgagcagtcaaccttct

SEQ ID NO: 3641 - DNA, 122 bp, Homo sapiens
  misc_feature (61)..(62): /note="This region represents a CpG dinucleotide"
  misc_feature (61)..(61): /note="Nucleotide may be methylated to form 5-methylcytosine"
atagcatgtgtcatacatatattctctctcactcatacacacatactcgctcttcttgtccggcttttaaaaaggaaggcagccagaaggccaagcccagtgatttgagttgaaaaggctgt

SEQ ID NO: 3642 - DNA, 122 bp, Homo sapiens
  misc_feature (61)..(62): /note="This region represents a CpG dinucleotide"
  misc_feature (61)..(61): /note="Nucleotide may be methylated to form 5-methylcytosine"
ttggaaggagctgggtcattagcattgcgcaggaaaattacaggttattctgttataattcgaaagccaactggacagtcatgaatgcacacagatctgggccctgcattgcaccctggcct

SEQ ID NO: 3643 - DNA, 122 bp, Homo sapiens
  misc_feature (61)..(62): /note="This region represents a CpG dinucleotide"
  misc_feature (61)..(61): /note="Nucleotide may be methylated to form 5-methylcytosine"
ccagctattggactcaggaaagacaaagtggtagctttgggtgggtgccagcaagaatcacgaaaatccactcagctgatgagactgtgtgattgtaagaatagttagagaaggctgtgttt

SEQ ID NO: 3644 - DNA, 122 bp, Homo sapiens
  misc_feature (61)..(62): /note="This region represents a CpG dinucleotide"
  misc_feature (61)..(61): /note="Nucleotide may be methylated to form 5-methylcytosine"
caaaacaatgtttgatcctcatggagggacactatgtcttgttatactattgtaagttcccggggttttattcattttggcatttagtggatttgtctttgacatgttggatttaaggacat

SEQ ID NO: 3645 - DNA, 122 bp, Homo sapiens
  misc_feature (61)..(62): /note="This region represents a CpG dinucleotide"
  misc_feature (61)..(61): /note="Nucleotide may be methylated to form 5-methylcytosine"
aattaaaccatctacttgaggctaagtcgagctaacctttgcccctgagggctgtgtctgcgttaacatcgccagcaaacagttgtataaaccaccgtgcaaatttcgttccaggacacatt

SEQ ID NO: 3646 - DNA, 122 bp, Homo sapiens
  misc_feature (61)..(62): /note="This region represents a CpG dinucleotide"
  misc_feature (61)..(61): /note="Nucleotide may be methylated to form 5-methylcytosine"
ggagtcctctggaaggtcattttcccaggctctttgcagagtacctcgagctcattccagcggaagtgtcaggattgggcaccctggaagcaaaacagcagaagagtgaaatcgagtcatga

SEQ ID NO: 3647 - DNA, 122 bp, Homo sapiens
  misc_feature (61)..(62): /note="This region represents a CpG dinucleotide"
  misc_feature (61)..(61): /note="Nucleotide may be methylated to form 5-methylcytosine"
cctgggcatgaagcagagtgtcctcccaccccatacctgttatctgcacaagagggtgggcggctcagtctgccaatccaggcaagcaggtgctttgaatgcctaaagatctgcttggatgt

SEQ ID NO: 3648 - DNA, 122 bp, Homo sapiens
  misc_feature (61)..(62): /note="This region represents a CpG dinucleotide"
  misc_feature (61)..(61): /note="Nucleotide may be methylated to form 5-methylcytosine"
ctagtggcatgaagtacaattacagtgttgtgcaaccatcaccagcatccatcttccaaacgtttcatcttccaaaactgaaacaatatccccattaaacagtaatgtccaaatctcccctc

SEQ ID NO: 3649 - DNA, 122 bp, Homo sapiens
  misc_feature (61)..(62): /note="This region represents a CpG dinucleotide"
  misc_feature (61)..(61): /note="Nucleotide may be methylated to form 5-methylcytosine"
ctaggtaaaataaggttgctgggctgcattcccagtaagttaagggattcttagtcatggcgtgaaaaagaagtttggcacgagatacaggtcatgaaaaacttgctgataaaacaggctgc

SEQ ID NO: 3650 - DNA, 122 bp, Homo sapiens
  misc_feature (61)..(62): /note="This region represents a CpG dinucleotide"
  misc_feature (61)..(61): /note="Nucleotide may be methylated to form 5-methylcytosine"
actttccagaaacaacatgatctagctgacacatcaatttcaacattgtgagaccctgagcggaagacccagtctaacctgctctgacttctaaattacaggacagtgagatgacacatgga

SEQ ID NO: 3651 - DNA, 122 bp, Homo sapiens
  misc_feature (61)..(62): /note="This region represents a CpG dinucleotide"
  misc_feature (61)..(61): /note="Nucleotide may be methylated to form 5-methylcytosine"
gtagtgccttttaacagatgtccttgctagactgccccgggtctttgaacatccattgggcgtcattggctacatatcttcatttctgtctgacaagccttaatctgttccctggaaattta

SEQ ID NO: 3652 - DNA, 122 bp, Homo sapiens
  misc_feature (61)..(62): /note="This region represents a CpG dinucleotide"
  misc_feature (61)..(61): /note="Nucleotide may be methylated to form 5-methylcytosine"
atttcacgtggagtctgttggattcgcaccatctggctcctgttttctggggaaactctgcgctggctttcgtcttcctccttttgtgattacataaacaaaagggtaaattgttttcttaa

SEQ ID NO: 3653 - DNA, 122 bp, Homo sapiens
  misc_feature (61)..(62): /note="This region represents a CpG dinucleotide"
  misc_feature (61)..(61): /note="Nucleotide may be methylated to form 5-methylcytosine"
gctattaataatacaacctactagttaaaagtcaacagaaccaaagaactaataaactgccgcaagaacttaaatgcaccacagccaaaagagtttctcagctacacaccttagctaaactg

SEQ ID NO: 3654 - DNA, 122 bp, Homo sapiens
  misc_feature (61)..(62): /note="This region represents a CpG dinucleotide"
  misc_feature (61)..(61): /note="Nucleotide may be methylated to form 5-methylcytosine"
aattggtctcactgcaggaaacagctttgtaaactgctgtccacctaaagtgtcatttatcgcatttgatatgcttaatataccttatattcttttgtaaatattcttcttacagccaaaaa

SEQ ID NO: 3655 - DNA, 122 bp, Homo sapiens
  misc_feature (61)..(62): /note="This region represents a CpG dinucleotide"
  misc_feature (61)..(61): /note="Nucleotide may be methylated to form 5-methylcytosine"
ttgacctcaacatcttagtcaacgcttatatgaaattttagcaaaacagtgattgaaaagcggagaatgtaaagtcccagagttggaggagtagttcatccggaagcatccgccaagtgatc

SEQ ID NO: 3656 - DNA, 122 bp, Homo sapiens
  misc_feature (61)..(62): /note="This region represents a CpG dinucleotide"
  misc_feature (61)..(61): /note="Nucleotide may be methylated to form 5-methylcytosine"
tacacctctatggagtacttaactatgtatggagctttcaggcctggaagttgctctgagcgagtcagtgagtggtgagtcagtgtaaaggccttggatgttactgtacaatactgtagact

SEQ ID NO: 3657 - DNA, 122 bp, Homo sapiens
  misc_feature (61)..(62): /note="This region represents a CpG dinucleotide"
  misc_feature (61)..(61): /note="Nucleotide may be methylated to form 5-methylcytosine"
agttagcagtaacatctttaagactaagttttttttgccactatagcacacgtttacttacgtaacaaaactccacatcctgcacatgtacccctgaacttaaaagttgagggggaaaaaaa

SEQ ID NO: 3658 - DNA, 122 bp, Homo sapiens
  misc_feature (61)..(62): /note="This region represents a CpG dinucleotide"
  misc_feature (61)..(61): /note="Nucleotide may be methylated to form 5-methylcytosine"
tttttttccattcaagataagctgtcattggaaggaatagtggtacaaagagctgaatgccgaccagctgccagtgaaaactacatgcgattaaaaaggttggtgttttgtaactccagaat

SEQ ID NO: 3659 - DNA, 122 bp, Homo sapiens
  misc_feature (61)..(62): /note="This region represents a CpG dinucleotide"
  misc_feature (61)..(61): /note="Nucleotide may be methylated to form 5-methylcytosine"
ccatcgagaaagcactgcagctggacctgggtctgagtcgcagttcctggctgtgagatgcgtctctccctctgtttattcatctgaaggacagggctgtgctgttctggggtcactgtgac

SEQ ID NO: 3660 - DNA, 122 bp, Homo sapiens
  misc_feature (61)..(62): /note="This region represents a CpG dinucleotide"
  misc_feature (61)..(61): /note="Nucleotide may be methylated to form 5-methylcytosine"
atccgcctgcctcggcctcccaaagtgctgggattacaggtgtgagccaccatacccagccgcttccaagctcatttctatggctgaagaatgccctcaggcagagagaagcaggaggttgt

SEQ ID NO: 3661 - DNA, 122 bp, Homo sapiens
  misc_feature (61)..(62): /note="This region represents a CpG dinucleotide"
  misc_feature (61)..(61): /note="Nucleotide may be methylated to form 5-methylcytosine"
agtacagaaggctttcctctccaatagtgaattaataaaggataagtaggaaaaacgttacgaaacgatgtggtaacattatagactctgtattagggcaaaaattgtgagatagtagaaga

SEQ ID NO: 3662 - DNA, 122 bp, Homo sapiens
  misc_feature (61)..(62): /note="This region represents a CpG dinucleotide"
  misc_feature (61)..(61): /note="Nucleotide may be methylated to form 5-methylcytosine"
acacacagccacaggtctattcccacatatgtgtgtttgccaccggtttgccctctctaccgagtcacagaagaatattaaagtttgtgagccctttaaagccaaacaggcacatttttcct

SEQ ID NO: 3663 - DNA, 122 bp, Homo sapiens
  misc_feature (61)..(62): /note="This region represents a CpG dinucleotide"
  misc_feature (61)..(61): /note="Nucleotide may be methylated to form 5-methylcytosine"
gaactgatacagataaaatatctggcacacagtgaatattcaataaatgtttgcttttgccgacactgttgccgtcactcaaaaatggctgttacttgggtgctgaggaggagtagcccaag

SEQ ID NO: 3664 - DNA, 122 bp, Homo sapiens
  misc_feature (61)..(62): /note="This region represents a CpG dinucleotide"
  misc_feature (61)..(61): /note="Nucleotide may be methylated to form 5-methylcytosine"
atactcaagatatatgaaaacatgtccacacaaaaacttgtacacccattttcatagcagcgtcattcacaatagccaaaagttgggatcagcccaagataaacaaatgtgatctattcata

SEQ ID NO: 3665 - DNA, 122 bp, Homo sapiens
  misc_feature (61)..(62): /note="This region represents a CpG dinucleotide"
  misc_feature (61)..(61): /note="Nucleotide may be methylated to form 5-methylcytosine"
tgctttattaatgatccagggaaaattccgatgacccagaattctgccataaagtgatatcgtgttattgcaaagtgatagtgttcttaacctccttgctgaaccacattttttttttttga

SEQ ID NO: 3666 - DNA, 122 bp, Homo sapiens
  misc_feature (61)..(62): /note="This region represents a CpG dinucleotide"
  misc_feature (61)..(61): /note="Nucleotide may be methylated to form 5-methylcytosine"
ggtgagtcaaagccacatgcaagctaaaagctatgcagtagaggagattgcatgagtaagcgaagaaagctagctggcaaaaagaatcaaaatcacagagaggacagaaacagagacaagag

SEQ ID NO: 3667 - DNA, 122 bp, Homo sapiens
  misc_feature (61)..(62): /note="This region represents a CpG dinucleotide"
  misc_feature (61)..(61): /note="Nucleotide may be methylated to form 5-methylcytosine"
atgacaccatctctgttttaaagaatcccacagtgtatgctgtgggagagacaaacttgtcgacacatcattgtggcacagagcaggggaatccacaacagaagtctctatgagatgccgga

SEQ ID NO: 3668 - DNA, 122 bp, Homo sapiens
  misc_feature (61)..(62): /note="This region represents a CpG dinucleotide"
  misc_feature (61)..(61): /note="Nucleotide may be methylated to form 5-methylcytosine"
gcaagatcaaagcgccagtgattcagctcctggtgagggctgtcttcctgtcttgctgatcgccatgttgtagctgtgttctcacatggcacagagaaagagggagagacagaaagggggag

SEQ ID NO: 3669 - DNA, 122 bp, Homo sapiens
  misc_feature (61)..(62): /note="This region represents a CpG dinucleotide"
  misc_feature (61)..(61): /note="Nucleotide may be methylated to form 5-methylcytosine"
acctcaccctttgtgtccacactccttaattctcttggtcatgagacaaagaactccaggcgaaacctcataacgagagactgctacattgtggtgtattggctaggctgtaacatgatctg

SEQ ID NO: 3670 - DNA, 122 bp, Homo sapiens
  misc_feature (61)..(62): /note="This region represents a CpG dinucleotide"
  misc_feature (61)..(61): /note="Nucleotide may be methylated to form 5-methylcytosine"
ctcctttggaatttgaaaggaattcctttgcccagaggggtgatgacttgggcatcaattcgcactttcctggtaaatgctctccttaggaagtaacccagaaaaaccatgcttagtcatca

SEQ ID NO: 3671 - DNA, 122 bp, Homo sapiens
  misc_feature (61)..(62): /note="This region represents a CpG dinucleotide"
  misc_feature (61)..(61): /note="Nucleotide may be methylated to form 5-methylcytosine"
tttccctacaaaataatttattggaacacacagctacagcagacactctatgtacaagcacgttgacactcctgacctaccctcaactaggggacccttttcttcccccttgccttgcggac

SEQ ID NO: 3672 - DNA, 122 bp, Homo sapiens
  misc_feature (61)..(62): /note="This region represents a CpG dinucleotide"
  misc_feature (61)..(61): /note="Nucleotide may be methylated to form 5-methylcytosine"
ggaattcccctttcaatcacgctgctctcctggagcccctggagcctctggctcaagcagcgcagtcggtctgtgcagtgtccctgacgtcatccagcgtatgcataagccctgctattgtc

SEQ ID NO: 3673 - DNA, 122 bp, Homo sapiens
  misc_feature (61)..(62): /note="This region represents a CpG dinucleotide"
  misc_feature (61)..(61): /note="Nucleotide may be methylated to form 5-methylcytosine"
accctgcaaaaccgggtctttgaagagaagttggtgactgggcctgcgctaataagagaacgttttgaagcagtctagagaatactgctttctggccctggctgccacaacaccactccctt

SEQ ID NO: 3674 - DNA, 122 bp, Homo sapiens
  misc_feature (61)..(62): /note="This region represents a CpG dinucleotide"
  misc_feature (61)..(61): /note="Nucleotide may be methylated to form 5-methylcytosine"
gaacaggctgggtggctggtttgtgcctgctctctgcttggacttgggcccgggggcagccgtgtgggcacagccagcgggccaggtggtactgattatgggtttctttgtcactgtcttgt

SEQ ID NO: 3675 - DNA, 122 bp, Homo sapiens
  misc_feature (61)..(62): /note="This region represents a CpG dinucleotide"
  misc_feature (61)..(61): /note="Nucleotide may be methylated to form 5-methylcytosine"
cgagtctgacatccccagagagggggaggggctggtcggaaccgtgagaagtggccgtggcggacttaggtctcccggcagtcagctccacaatctgcgcccggaattctccttgcccagct

SEQ ID NO: 3676 - DNA, 122 bp, Homo sapiens
  misc_feature (61)..(62): /note="This region represents a CpG dinucleotide"
  misc_feature (61)..(61): /note="Nucleotide may be methylated to form 5-methylcytosine"
atagaacacagaaagacacacaaagcacactagattctctacagcttaagattagcctcacgaatccttcatctcattaactaaaactttacagaggagataaacagtgatttttactattc

SEQ ID NO: 3677 - DNA, 122 bp, Homo sapiens
  misc_feature (61)..(62): /note="This region represents a CpG dinucleotide"
  misc_feature (61)..(61): /note="Nucleotide may be methylated to form 5-methylcytosine"
gagacatgatttcaggggctttaatttattcacaaaatgtcgtcgttgaaattcatcgtacgggcccaggaaactcttcacaggtggtgaatgtgccaagcaaagcctcatggccacatcca

SEQ ID NO: 3678 - DNA, 122 bp, Homo sapiens
  misc_feature (61)..(62): /note="This region represents a CpG dinucleotide"
  misc_feature (61)..(61): /note="Nucleotide may be methylated to form 5-methylcytosine"
gcctgaaaacaaccacatgcaataataaaactctccccagttccaaatggcttgaactagcgacacacaaagagagggaagaggcccctgtggattgaagattattaaatatgaagtatgtt

SEQ ID NO: 3679 - DNA, 122 bp, Homo sapiens
  misc_feature (61)..(62): /note="This region represents a CpG dinucleotide"
  misc_feature (61)..(61): /note="Nucleotide may be methylated to form 5-methylcytosine"
ggaattcataagcagaattgaatttgttttagttaactccttatttgattggaatattgtcgacttaacaaaatagtagaaagagcattgggctgaagtgagaagatttgaattctagtcca

SEQ ID NO: 3680 - DNA, 122 bp, Homo sapiens
  misc_feature (61)..(62): /note="This region represents a CpG dinucleotide"
  misc_feature (61)..(61): /note="Nucleotide may be methylated to form 5-methylcytosine"
gaagcaaacaggaaaggactgggcagtggtgaggccttgcgccttgcaattccccaaccccgctgacacatcttttgcccatcatgatgagcttccttcctgtcatccactcgagggcccaa

SEQ ID NO: 3681 - DNA, 122 bp, Homo sapiens
  misc_feature (61)..(62): /note="This region represents a CpG dinucleotide"
  misc_feature (61)..(61): /note="Nucleotide may be methylated to form 5-methylcytosine"
ttcctgccacctgctagtttctctatggtggggctcagaaaccaacatcccacaatatggcgcactgacatgccgcactgaggaatcctcaaggtctctctgaccttccgaccttcccccct

SEQ ID NO: 3682 - DNA, 122 bp, Homo sapiens
  misc_feature (61)..(62): /note="This region represents a CpG dinucleotide"
  misc_feature (61)..(61): /note="Nucleotide may be methylated to form 5-methylcytosine"
acagtcaacaaatgaatagaagggtgtgtgttctctgtccaagtggactccaaacccactcggtgttgttctctctgtgccctgcagggcgcacacagtgtcgtcagcacacggagctcttt

SEQ ID NO: 3683 - DNA, 122 bp, Homo sapiens
  misc_feature (61)..(62): /note="This region represents a CpG dinucleotide"
  misc_feature (61)..(61): /note="Nucleotide may be methylated to form 5-methylcytosine"
agcttggctctagggcaagctgccctgcacagctggatggcgtctggaaaggaatgtgaccgtgcagggcggggacctggaaggcaggattcaaagattccttcagaggctcttcgctggtg

SEQ ID NO: 3684 - DNA, 122 bp, Homo sapiens
  misc_feature (61)..(62): /note="This region represents a CpG dinucleotide"
  misc_feature (61)..(61): /note="Nucleotide may be methylated to form 5-methylcytosine"
tttgtaattctctcctacctatccatacttgagtcagacctacatgttatacctgtttgccgagtgacacttaagcagaaattgtagtattgttttctcttttctcagaagtccttaagaaa

SEQ ID NO: 3685 - DNA, 122 bp, Homo sapiens
  misc_feature (61)..(62): /note="This region represents a CpG dinucleotide"
  misc_feature (61)..(61): /note="Nucleotide may be methylated to form 5-methylcytosine"
cttattcttcactacttttgttcaatgtctcggaggctccttctttattccctcaacacccgctgtgttcttccatcccggcacttaaaggctgcctgtaagaacttgtttacctacctgtc

SEQ ID NO: 3686 - DNA, 122 bp, Homo sapiens
  misc_feature (61)..(62): /note="This region represents a CpG dinucleotide"
  misc_feature (61)..(61): /note="Nucleotide may be methylated to form 5-methylcytosine"
gtgagcactcatttaacttcctgataccatctgggagtgcttgcagtctttccgctaacacgctaattaagcatctatcagggtcctccagggagctgagtggctcagtaacaccatccagt

SEQ ID NO: 3687 - DNA, 122 bp, Homo sapiens
  misc_feature (61)..(62): /note="This region represents a CpG dinucleotide"
  misc_feature (61)..(61): /note="Nucleotide may be methylated to form 5-methylcytosine"
aatttctgtcttactcttccttccctagaagtgcctgcctccggtctttgctggaggttacgctttctagcctgcagaatgaccaccttgtaggctgtaaccctttgtaagaaataaagtat

SEQ ID NO: 3688 - DNA, 122 bp, Homo sapiens
  misc_feature (61)..(62): /note="This region represents a CpG dinucleotide"
  misc_feature (61)..(61): /note="Nucleotide may be methylated to form 5-methylcytosine"
gggggaaggctgctgtgttgggcccttgtggggagtgtgctttccatctgattgcctttccgcatctgcacaactaacttcccccatgggtcacgagtttttccaagactgacaggaaccta

SEQ ID NO: 3689 - DNA, 122 bp, Homo sapiens
  misc_feature (61)..(62): /note="This region represents a CpG dinucleotide"
  misc_feature (61)..(61): /note="Nucleotide may be methylated to form 5-methylcytosine"
atatgatcttataaataagacagttatatccagctgcttcagtgtcaactatgttgctcccgctgcgattttgatatgatggagcatgacaggactcttgaatctgtcaaagcatgtaaggc

SEQ ID NO: 3690 - DNA, 122 bp, Homo sapiens
  misc_feature (61)..(62): /note="This region represents a CpG dinucleotide"
  misc_feature (61)..(61): /note="Nucleotide may be methylated to form 5-methylcytosine"
aacccttcatttctcttttgtatcatatacttgaaggtttctcactcttcaagctctggtcgtgatatgagaacatagatgcctggtgtttgcctgtttgactttcgagtgcagaccacaca

SEQ ID NO: 3691 - DNA, 122 bp, Homo sapiens
  misc_feature (61)..(62): /note="This region represents a CpG dinucleotide"
  misc_feature (61)..(61): /note="Nucleotide may be methylated to form 5-methylcytosine"
aaaattcagggcgagtccgcagtgcaaagcaaaagcaagtttattaagaaagtacagtggcgaaaggacagctactgcatagacagagtaggatgttcccaaaagttagaggaggaacgcat

SEQ ID NO: 3692 - DNA, 122 bp, Homo sapiens
  misc_feature (61)..(62): /note="This region represents a CpG dinucleotide"
  misc_feature (61)..(61): /note="Nucleotide may be methylated to form 5-methylcytosine"
atgtgacagctcctttatcaccagccttctctgcttcggaatttttacttcaaaggaaagcgttaactattgtttcaaatgggaggaacagagaagagagcagaaagataaaaaaacatctc

SEQ ID NO: 3693 - DNA, 122 bp, Homo sapiens
  misc_feature (61)..(62): /note="This region represents a CpG dinucleotide"
  misc_feature (61)..(61): /note="Nucleotide may be methylated to form 5-methylcytosine"
ctttcaccataactaggcccttcagggctgaactgtttcaaccttgggcagttcctgatacggaacagcattgcagcctacaactgctaggatcagggaagggaaacccattctgtgctata

SEQ ID NO: 3694 - DNA, 122 bp, Homo sapiens
  misc_feature (61)..(62): /note="This region represents a CpG dinucleotide"
  misc_feature (61)..(61): /note="Nucleotide may be methylated to form 5-methylcytosine"
ttgtgaagctgggtgtctgggagccagggcccgctgcgctcaacccggcctggttcacggcgaagtccccaggccgcatcctggacgtctcagctgcaaagatgctcccctctctcacctgc

SEQ ID NO: 3695 - DNA, 122 bp, Homo sapiens
  misc_feature (61)..(62): /note="This region represents a CpG dinucleotide"
  misc_feature (61)..(61): /note="Nucleotide may be methylated to form 5-methylcytosine"
aaaatcaatcaatcaatctcgcttgctcagtgggcctcttggttctgtttctctggagaacgtaacacagatttttggtacggggaatagggtactgctgtaacaaatacctaacaatgggg

SEQ ID NO: 3696 - DNA, 122 bp, Homo sapiens
  misc_feature (61)..(62): /note="This region represents a CpG dinucleotide"
  misc_feature (61)..(61): /note="Nucleotide may be methylated to form 5-methylcytosine"
gagaagagaaatctgagtttaacccgatcctgtcagaagagcgggaggaaagagctccggcggacagggctcccaggcccctccaggacgaggttggaggaccaagcgcagaaggtaaggac

SEQ ID NO: 3697 - DNA, 122 bp, Homo sapiens
  misc_feature (61)..(62): /note="This region represents a CpG dinucleotide"
  misc_feature (61)..(61): /note="Nucleotide may be methylated to form 5-methylcytosine"
ctaaaagctttttgggttaaggacatggtcattccatgttacagcttattttttcctaatcgaaatccccaaatgatcaatttcctagtcttcttccatgctttttctccactgcactatca

SEQ ID NO: 3698 - DNA, 122 bp, Homo sapiens
  misc_feature (61)..(62): /note="This region represents a CpG dinucleotide"
  misc_feature (61)..(61): /note="Nucleotide may be methylated to form 5-methylcytosine"
tcccgcaatcagtttcaataagctctcacagtgattctcacacatgcgtaagtttgagaacgacattaggacaaaagttttgcacctgaagtgtcaagagagcgagagcacaagagttctct

SEQ ID NO: 3699 - DNA, 122 bp, Homo sapiens
  misc_feature (61)..(62): /note="This region represents a CpG dinucleotide"
  misc_feature (61)..(61): /note="Nucleotide may be methylated to form 5-methylcytosine"
gttagattccactgaatctcactgctttgttgcagtttaacgagcaggctaggattgcagcgctgtcatttcagttgggccaccaagccttgaatgaggagataaaactggaagataaagtc

SEQ ID NO: 3700 - DNA, 122 bp, Homo sapiens
  misc_feature (61)..(62): /note="This region represents a CpG dinucleotide"
  misc_feature (61)..(61): /note="Nucleotide may be methylated to form 5-methylcytosine"
tccaaaactcgacccgctggccccttccattgtcattgctacatgaggtccacgccactccgccgttcagcagccgccccgaaccagcgaagaaagctatcgatcgtaaaacaaaataaaca

SEQ ID NO: 3701 - DNA, 122 bp, Homo sapiens
  misc_feature (61)..(62): /note="This region represents a CpG dinucleotide"
  misc_feature (61)..(61): /note="Nucleotide may be methylated to form 5-methylcytosine"
aggttttgttccatgaaatataaaaaaaattgagttagaagagtcaatagtgatgggtagcgataatatttttatggtttgacacatgactgtgaaaagatcagggttccaacaaatgggtg

SEQ ID NO: 3702 - DNA, 122 bp, Homo sapiens
  misc_feature (61)..(62): /note="This region represents a CpG dinucleotide"
  misc_feature (61)..(61): /note="Nucleotide may be methylated to form 5-methylcytosine"
acggctcgctcctcgcctcctcccccttcggcgggcaccgctagtaccgcgcaaccaaaccgccccctgctccaccgccgcctcctcaggccgctccgcccacagccagcaaggtaagggag

SEQ ID NO: 3703 - DNA, 122 bp, Homo sapiens
  misc_feature (61)..(62): /note="This region represents a CpG dinucleotide"
  misc_feature (61)..(61): /note="Nucleotide may be methylated to form 5-methylcytosine"
tccatcggaaacctctcctcccaagcttgctttgaaatgggctgtgacatttggtcactgcgtagcaagtcctgtgagaatgagccgagtgcctgactttagaaagtgagtactttctaaag

SEQ ID NO: 3704 - DNA, 122 bp, Homo sapiens
  misc_feature (61)..(62): /note="This region represents a CpG dinucleotide"
  misc_feature (61)..(61): /note="Nucleotide may be methylated to form 5-methylcytosine"
caccaagtggctttcttccctggtttgcttttaaattctggctttgccactgtctaattccgtgacatcagacaaaactggtaactttttgaagcctcacctgtaaaatggaattaataata

SEQ ID NO: 3705 - DNA, 122 bp, Homo sapiens
  misc_feature (61)..(62): /note="This region represents a CpG dinucleotide"
  misc_feature (61)..(61): /note="Nucleotide may be methylated to form 5-methylcytosine"
aatgtagtgacagccaagaaggatattttgaagtttgaaatgatccctatataaatagaacggatcagcataactttgggataaaattagccgacagtttgtggactctccagcatgcgcct

SEQ ID NO: 3706 - DNA, 122 bp, Homo sapiens
  misc_feature (61)..(62): /note="This region represents a CpG dinucleotide"
  misc_feature (61)..(61): /note="Nucleotide may be methylated to form 5-methylcytosine"
aaagcagaatgatgtacccggtgctgggtaagtactccaaagccgaattggctgtctggtcgcccagcctggggacctgcaacaggtaagggtggaagggaggggaggaggaaggcctctct

SEQ ID NO: 3707 - DNA, 122 bp, Homo sapiens
  misc_feature (61)..(62): /note="This region represents a CpG dinucleotide"
  misc_feature (61)..(61): /note="Nucleotide may be methylated to form 5-methylcytosine"
atgaaccctttggtacaagccaggtttttccaagagcggtgtgtttgaaagcgtgagtagcgacccattactgagtcatgagaacaatttagtgggtcagccagcactgtttttaagtgaag

SEQ ID NO: 3708 - DNA, 122 bp, Homo sapiens
  misc_feature (61)..(62): /note="This region represents a CpG dinucleotide"
  misc_feature (61)..(61): /note="Nucleotide may be methylated to form 5-methylcytosine"
accaccacagactctcacgtgtccccgactcgactgtactgcagtgaggaggaaaaggggcggtgtccattacgcgcacatcactcatctgtctgtcagggctgtttacgaggtaataggaa

SEQ ID NO: 3709 - DNA, 122 bp, Homo sapiens
  misc_feature (61)..(62): /note="This region represents a CpG dinucleotide"
  misc_feature (61)..(61): /note="Nucleotide may be methylated to form 5-methylcytosine"
caggaaaagctaaaatgtgatgggtctgaaggttatgctaaggagcttaccttaggattacggttacaatgggggaattttaagcaagggataaaacaaacagtcctacatttttaaaagac

SEQ ID NO: 3710 - DNA, 122 bp, Homo sapiens
  misc_feature (61)..(62): /note="This region represents a CpG dinucleotide"
  misc_feature (61)..(61): /note="Nucleotide may be methylated to form 5-methylcytosine"
gagagtgcacagacaccaccagcttgagagcccgaccttgtttcttgctaagaaatgtcccgtttttgcctgtttttggcagaagccagactgggagattgctgcaaatggctgcaacaacc

SEQ ID NO: 3711 - DNA, 122 bp, Homo sapiens
  misc_feature (61)..(62): /note="This region represents a CpG dinucleotide"
  misc_feature (61)..(61): /note="Nucleotide may be methylated to form 5-methylcytosine"
aattactgaggatgattaacaaacacaatgaaaactggatcaacggctccgtagtccatacgttgaaatggtactagagatggtatgttgcctatacactacagtcaacactagtattctct

SEQ ID NO: 3712 - DNA, 122 bp, Homo sapiens
  misc_feature (61)..(62): /note="This region represents a CpG dinucleotide"
  misc_feature (61)..(61): /note="Nucleotide may be methylated to form 5-methylcytosine"
gcagaacctcgctctggcgtttacaatgccatctcccttcgtcacagcacgacaccatggcggcagtcacttccgctatgcctcacgacacttctgctacgccttgcatcacttacggtgca

SEQ ID NO: 3713 - DNA, 122 bp, Homo sapiens
  misc_feature (61)..(62): /note="This region represents a CpG dinucleotide"
  misc_feature (61)..(61): /note="Nucleotide may be methylated to form 5-methylcytosine"
ataacaacattcttcttgaagtgctgaacaataggcctttggagagactgtgataaaccacgtcagactccggacaaacacgagtgtaaaaataggcatcagaggcattgacacagccacct

SEQ ID NO: 3714 - DNA, 122 bp, Homo sapiens
  misc_feature (61)..(62): /note="This region represents a CpG dinucleotide"
  misc_feature (61)..(61): /note="Nucleotide may be methylated to form 5-methylcytosine"
ttcattgcagtgctgtagctggtctgttttctgtttggttagtcaacatgccccagggatcgttagctgtttttaccgttctcctggatccctgtggatttctaatgggcaaactttttaaa

SEQ ID NO: 3715 - DNA, 122 bp, Homo sapiens
  misc_feature (61)..(62): /note="This region represents a CpG dinucleotide"
  misc_feature (61)..(61): /note="Nucleotide may be methylated to form 5-methylcytosine"
ggaacacaaatcggctcatcggagagccagctgcttccttccaaggcggggaacgttgcacgacacgccgcctggaactgcgcggaggcagtaaaaatcaatgtttccatttgtggcccatc

SEQ ID NO: 3716 - DNA, 122 bp, Homo sapiens
  misc_feature (61)..(62): /note="This region represents a CpG dinucleotide"
  misc_feature (61)..(61): /note="Nucleotide may be methylated to form 5-methylcytosine"
attagtgcctggtaggaaatctttcattttcccagcacaaagttcattatggtgccccagcgctcactcattattagcatcccttttagctactaaacagagaagaaagtttggagtccaaa

SEQ ID NO: 3717 - DNA, 122 bp, Homo sapiens
  misc_feature (61)..(62): /note="This region represents a CpG dinucleotide"
  misc_feature (61)..(61): /note="Nucleotide may be methylated to form 5-methylcytosine"
atcacccaggtgctgctggatgaggaaagacaggccatggcgaaatcccgccggctggagcgcagcaccaacagcttcagttactcatcataccacaccctggaggaggtaggtctggccgg

SEQ ID NO: 3718 - DNA, 122 bp, Homo sapiens
  misc_feature (61)..(62): /note="This region represents a CpG dinucleotide"
  misc_feature (61)..(61): /note="Nucleotide may be methylated to form 5-methylcytosine"
caggatccacctgccttggcctcccaaagtgctaggattataggcttgaggcactgtgcccggcctatatattgtattttaaagttatgcattctgtgggagtcagctgaatttttgtgttg

SEQ ID NO: 3719 - DNA, 122 bp, Homo sapiens
  misc_feature (61)..(62): /note="This region represents a CpG dinucleotide"
  misc_feature (61)..(61): /note="Nucleotide may be methylated to form 5-methylcytosine"
cgctacttctgcgctactcagcgacctcgttgcctctgccaccatgccgcgctctttcctcgtcaggaagctccctgaccctgatcggaagcccaactacagcaaactgccggactcgaatc

SEQ ID NO: 3720 - DNA, 122 bp, Homo sapiens
  misc_feature (61)..(62): /note="This region represents a CpG dinucleotide"
  misc_feature (61)..(61): /note="Nucleotide may be methylated to form 5-methylcytosine"
atggaattaaactgaaagacccaaactttctgaccctttatagaaagctcacttcatttacgctaactagaatgattcattgtgcctgtgactcagtgtgtcagcaagtgcttagatgtgag

SEQ ID NO: 3721 - DNA, 122 bp, Homo sapiens
  misc_feature (61)..(62): /note="This region represents a CpG dinucleotide"
  misc_feature (61)..(61): /note="Nucleotide may be methylated to form 5-methylcytosine"
taaagatcccgggctacctagttgcctctctcagcaaacaaaatcagccattcagttccacgcagcatttacacttaggcaggctggctccgactacatgacactggagtcatgcctgcact

SEQ ID NO: 3722 - DNA, 122 bp, Homo sapiens
  misc_feature (61)..(62): /note="This region represents a CpG dinucleotide"
  misc_feature (61)..(61): /note="Nucleotide may be methylated to form 5-methylcytosine"
ctcaagcaaagatttcagttacacagctacggcattttctccctttcttaataacaaacacgctacagaagaatgtttgtcactgtaattattgtccaggcaaagattgcaaattccagcca

SEQ ID NO: 3723 - DNA, 122 bp, Homo sapiens
  misc_feature (61)..(62): /note="This region represents a CpG dinucleotide"
  misc_feature (61)..(61): /note="Nucleotide may be methylated to form 5-methylcytosine"
cagagaaagctctgaccccaagagaaaccgacatcatacacacacacacacacacacacacgcagggcagaggaatatgtggtttctcaaacggattcctaaaacatacatatatatataat

SEQ ID NO: 3724 - DNA, 122 bp, Homo sapiens
  misc_feature (61)..(62): /note="This region represents a CpG dinucleotide"
  misc_feature (61)..(61): /note="Nucleotide may be methylated to form 5-methylcytosine"
tttcctctgaggaggcaagaatcaagttgctgcatactcatatagatttgctgctgctaacgaaaccaagcgtatgattctttcttcttttttgcagctgtgaggagttttagccaattcaa

SEQ ID NO: 3725 - DNA, 122 bp, Homo sapiens
  misc_feature (61)..(62): /note="This region represents a CpG dinucleotide"
  misc_feature (61)..(61): /note="Nucleotide may be methylated to form 5-methylcytosine"
cccaagtgatcatgctgcactgagctatgatcgtgccactgcactccagactgtgcaacacggtgagaccccatctctaaaacaaacaacaagaaaaaaagaaatgagattgaaaaataaga

SEQ ID NO: 3726 - DNA, 122 bp, Homo sapiens
  misc_feature (61)..(62): /note="This region represents a CpG dinucleotide"
  misc_feature (61)..(61): /note="Nucleotide may be methylated to form 5-methylcytosine"
tacaatgatactatttttagtgaggagaaatttattaaaatatacaaatgtttgaggtaacgttaggtattcaggacaaaaaatgtttattgttttgattatacatgcagtaccttttgtga

SEQ ID NO: 3727 - DNA, 122 bp, Homo sapiens
  misc_feature (61)..(62): /note="This region represents a CpG dinucleotide"
  misc_feature (61)..(61): /note="Nucleotide may be methylated to form 5-methylcytosine"
aagggcttgtttttgcacatccctaagtataacacttaatgtgctgttgtaacttcccagcgctcccttgtctaataggcactgaatctaacagttttacagtttgggaagactcagtgcta

SEQ ID NO: 3728 - DNA, 122 bp, Homo sapiens
  misc_feature (61)..(62): /note="This region represents a CpG dinucleotide"
  misc_feature (61)..(61): /note="Nucleotide may be methylated to form 5-methylcytosine"
gctggggctgtgtggagacaggggctgtggctgccttggcttgtcatggcccaccacagacgcacctgtcctgtgctgcttcgccagcagccagctgtccatggccctgagcctgtcacacc

SEQ ID NO: 3729 - DNA, 122 bp, Homo sapiens
  misc_feature (61)..(62): /note="This region represents a CpG dinucleotide"
  misc_feature (61)..(61): /note="Nucleotide may be methylated to form 5-methylcytosine"
tcctgtttactgactaaaacatagcaaaggatcatgctcctacatgctgttgcagatcttcgcattccctttaaagtttcccctagttatttcaaggagttccctggggcttcatcaagtat

SEQ ID NO: 3730 - DNA, 122 bp, Homo sapiens
  misc_feature (61)..(62): /note="This region represents a CpG dinucleotide"
  misc_feature (61)..(61): /note="Nucleotide may be methylated to form 5-methylcytosine"
aaaattgctgactaccttcgatagcttgcttaacccattggatctgcggtgacttctcttcgtgatgagctgttatgaagtgcatatgagatgatgcatggaatgcctggagcatagtgagg

SEQ ID NO: 3731 - DNA, 122 bp, Homo sapiens
  misc_feature (61)..(62): /note="This region represents a CpG dinucleotide"
  misc_feature (61)..(61): /note="Nucleotide may be methylated to form 5-methylcytosine"
catttattttgtgttattcccaggcatgttggtgtttgcagtcacatggaatacccctgccgcttccagaatgcttctgccaccacccaggagatcattcctcatcgggtctttgcccctgt

SEQ ID NO: 3732 - DNA, 122 bp, Homo sapiens
  misc_feature (61)..(62): /note="This region represents a CpG dinucleotide"
  misc_feature (61)..(61): /note="Nucleotide may be methylated to form 5-methylcytosine"
gctttacctttcctggtggcaggcttcccgtccatttagcttctgtgggaaatggtaccacgctttgtggtggagtttccctgtgccctgaatctcttttactacgacagtcttttatctat

SEQ ID NO: 3733 - DNA, 122 bp, Homo sapiens
  misc_feature (61)..(62): /note="This region represents a CpG dinucleotide"
  misc_feature (61)..(61): /note="Nucleotide may be methylated to form 5-methylcytosine"
aacctttaacaaaaggggaagcagttcggacagacagtttctaactgcaaagcttggctacgttatctaaaattagaaacagtattctgaagcaaatgagtaaatgataacaaatgttcaat

SEQ ID NO: 3734 - DNA, 122 bp, Homo sapiens
  misc_feature (61)..(62): /note="This region represents a CpG dinucleotide"
  misc_feature (61)..(61): /note="Nucleotide may be methylated to form 5-methylcytosine"
ctctgagctgcttttctgggcacactgcctgtagggtagtcctggtcttaaggagcagtacgtctgctgctgtacactgctgcttcaatacaaattgctgtttaacccacctgtttaacacc

SEQ ID NO: 3735 - DNA, 122 bp, Homo sapiens
  misc_feature (61)..(62): /note="This region represents a CpG dinucleotide"
  misc_feature (61)..(61): /note="Nucleotide may be methylated to form 5-methylcytosine"
ggttatctccttggcttaatagcctagttatggctgtttgcttaaacacacatacgcacacgcacacacaagcttaagcaggaagggaaatttatgaggagaatacaaggaacccaagaaca

SEQ ID NO: 3736 - DNA, 122 bp, Homo sapiens
  misc_feature (61)..(62): /note="This region represents a CpG dinucleotide"
  misc_feature (61)..(61): /note="Nucleotide may be methylated to form 5-methylcytosine"
ccctgtagaaatgttagtccacctgtggctgcaaattgccattatccaacttgttaagtgcggcatttcttcctaatattcacaagtcacacaatgagtcaatatcactcctactctggggt

SEQ ID NO: 3737 - DNA, 122 bp, Homo sapiens
  misc_feature (61)..(62): /note="This region represents a CpG dinucleotide"
  misc_feature (61)..(61): /note="Nucleotide may be methylated to form 5-methylcytosine"
cctcagttccagctttaacacttaggtgctgtatggcctgtacacattatttaaccacatcgtgctttgtttcttcacctgtacagtggcgataagaagagtatctacctcataaagtcact

SEQ ID NO: 3738 - DNA, 122 bp, Homo sapiens
  misc_feature (61)..(62): /note="This region represents a CpG dinucleotide"
  misc_feature (61)..(61): /note="Nucleotide may be methylated to form 5-methylcytosine"
aaacggaggggcggaagaagacctggctctctgactcggaaaacactgagagattttaaacggatagaagacaaagctggcatcagctaaagacccggtgacccagacactgcagccctgca

SEQ ID NO: 3739 - DNA, 122 bp, Homo sapiens
  misc_feature (61)..(62): /note="This region represents a CpG dinucleotide"
  misc_feature (61)..(61): /note="Nucleotide may be methylated to form 5-methylcytosine"
tgagttgataaatttggatctcacatcagcaggctcactatcctgtacccatgagactgccgccacctgtggcagaaagcataaattgaagatgaaggcattaaaaggtgaaaaagcaacag

SEQ ID NO: 3740 - DNA, 122 bp, Homo sapiens
  misc_feature (61)..(62): /note="This region represents a CpG dinucleotide"
  misc_feature (61)..(61): /note="Nucleotide may be methylated to form 5-methylcytosine"
attttgagtaactaccaaactgtcttccaagttggctgtaccaattttcaatcccatcagcgaggtataagggttccaatgtttctttatccttaccaacacatgttgttgcctgtcttttt

SEQ ID NO: 3741 - DNA, 122 bp, Homo sapiens
  misc_feature (61)..(62): /note="This region represents a CpG dinucleotide"
  misc_feature (61)..(61): /note="Nucleotide may be methylated to form 5-methylcytosine"
gtgttactacttaacactctatagagaaacagccacataactctggcatgagctgggtcacggggtgttgtcacacacccactcgcctatacttttcttgatgtgaatatttcttggatgaa

SEQ ID NO: 3742 - DNA, 122 bp, Homo sapiens
  misc_feature (61)..(62): /note="This region represents a CpG dinucleotide"
  misc_feature (61)..(61): /note="Nucleotide may be methylated to form 5-methylcytosine"
accaggcctcctcctatcccaggtggaaactaaagaggaaaagatgaagccaaactcaggcggaagcaacataattaaactggtttatcgtttggcaacagagatcagaggagtgagtggaa

SEQ ID NO: 3743 - DNA, 122 bp, Homo sapiens
  misc_feature (61)..(62): /note="This region represents a CpG dinucleotide"
  misc_feature (61)..(61): /note="Nucleotide may be methylated to form 5-methylcytosine"
agtcactgagaaaacacatatatttgtaatggcaaaacataccacataatctcacaataccgttttgatacctgcatgagtgtatgagcaacgacttgtttttgacaactcccttctacctt

SEQ ID NO: 3744 - DNA, 122 bp, Homo sapiens
  misc_feature (61)..(62): /note="This region represents a CpG dinucleotide"
  misc_feature (61)..(61): /note="Nucleotide may be methylated to form 5-methylcytosine"
gccacatggagttaggactatcatgactaaattgtcctggaaccctaagtcctgggaccccgtgaagagatctagtggcagggaggatgaggactgggatgagtccatagaggttcccatcc

SEQ ID NO: 3745 - DNA, 122 bp, Homo sapiens
  misc_feature (61)..(62): /note="This region represents a CpG dinucleotide"
  misc_feature (61)..(61): /note="Nucleotide may be methylated to form 5-methylcytosine"
ctctaccccttgctgtggacaaatactttaatctgtgtcttaatttcttaatctgagaaacgaggactaaactagctatgtttgtgaggatttgagatgctatgtagaaatacctggcactg

SEQ ID NO: 3746 - DNA, 122 bp, Homo sapiens
  misc_feature (61)..(62): /note="This region represents a CpG dinucleotide"
  misc_feature (61)..(61): /note="Nucleotide may be methylated to form 5-methylcytosine"
ttagaaagcattcaagtgttagaaaaggacggctgtcagcaaggtcctcatgttcagcagcgcatgtcccgtctggtaaatggtgccgtcattgttcagtacacaactttcacagacacaca

SEQ ID NO: 3747 - DNA, 122 bp, Homo sapiens
  misc_feature (61)..(62): /note="This region represents a CpG dinucleotide"
  misc_feature (61)..(61): /note="Nucleotide may be methylated to form 5-methylcytosine"
tcgttgcctggcccttgccagagagacgttcaacaaaaattctcttttttaaatgttggacggccgcagactggaaaaccagtcagctgattgagtttgctaatctgtttccagttaacaaa

SEQ ID NO: 3748 - DNA, 122 bp, Homo sapiens
  misc_feature (61)..(62): /note="This region represents a CpG dinucleotide"
  misc_feature (61)..(61): /note="Nucleotide may be methylated to form 5-methylcytosine"
ctgcacagagaagactgcctgcttcttataggttggttgtcgctgtctggaagagtttagcgctgctctgcatcttctgcctcacctgaaatcctacgtgtatcctatgccgttcctatgaa

SEQ ID NO: 3749 - DNA, 122 bp, Homo sapiens
  misc_feature (61)..(62): /note="This region represents a CpG dinucleotide"
  misc_feature (61)..(61): /note="Nucleotide may be methylated to form 5-methylcytosine"
gccacagataatttgcctttctctcacatgcaaaacgtgcacccctttccaagactctgccgaggtcttatcccattgtgacatcagaccgggctctttgagatctgcccttcttgggctcc

SEQ ID NO: 3750 - DNA, 122 bp, Homo sapiens
  misc_feature (61)..(62): /note="This region represents a CpG dinucleotide"
  misc_feature (61)..(61): /note="Nucleotide may be methylated to form 5-methylcytosine"
tatctgtgttttggctctgtgattgagggcatgtagcaacccacaccaaggaaaatttgacgagctgctaaagacaaatattggcaactagagacgacacaaaattctaactgctctgacct

SEQ ID NO: 3751 - DNA, 122 bp, Homo sapiens
  misc_feature (61)..(62): /note="This region represents a CpG dinucleotide"
  misc_feature (61)..(61): /note="Nucleotide may be methylated to form 5-methylcytosine"
acatgtgggaacagcctataaaactaggaaagctaagcggccattgaaaacccatcacttcggatccaccagccacataaccctggacaggaagatgaaaagtaccttcttcccagcgctca

SEQ ID NO: 3752 - DNA, 122 bp, Homo sapiens
  misc_feature (61)..(62): /note="This region represents a CpG dinucleotide"
  misc_feature (61)..(61): /note="Nucleotide may be methylated to form 5-methylcytosine"
ctcctccaagatttcaaggttttcctcttgtcagtttcgttatggaaactcctggttccccgctagcctgcgctcctcagtagggctctgaaactcagctctcatctgccccagtgttatgt

SEQ ID NO: 3753 - DNA, 122 bp, Homo sapiens
  misc_feature (61)..(62): /note="This region represents a CpG dinucleotide"
  misc_feature (61)..(61): /note="Nucleotide may be methylated to form 5-methylcytosine"
gcccccaagagacactggggacagtaatgtagcttctgtttttcattccatgtaacaatgcgatgacacttccttagtgtgcccactcagcctttccaagccacacccttttgttcctttat

SEQ ID NO: 3754 - DNA, 122 bp, Homo sapiens
  misc_feature (61)..(62): /note="This region represents a CpG dinucleotide"
  misc_feature (61)..(61): /note="Nucleotide may be methylated to form 5-methylcytosine"
cataaaccctcagaagtggaggtatcacggaaatgagcttaatgttttatgctttcctgtcgccttaaactgccaagaaggctggtgcacctcagaggaaagaatactcacaggaattagtt

SEQ ID NO: 3755 - DNA, 122 bp, Homo sapiens
  misc_feature (61)..(62): /note="This region represents a CpG dinucleotide"
  misc_feature (61)..(61): /note="Nucleotide may be methylated to form 5-methylcytosine"
gagtggtgtattagtagctaaaggcatgagctctagaacccgagtgccgggttcagatcccgcctctcccacttgatagcctataacctcaagcaggtttcctaacctctctgtgcctcagt

SEQ ID NO: 3756 - DNA, 122 bp, Homo sapiens
  misc_feature (61)..(62): /note="This region represents a CpG dinucleotide"
  misc_feature (61)..(61): /note="Nucleotide may be methylated to form 5-methylcytosine"
ctcctggaaaatggactggaggccttttagaacagtctcaccatcagctttggcgccgagcgtgaagtcgagcatgctgtgccgtgctgctgccatagtgaggcgaggccctgtgccatgcc

SEQ ID NO: 3757 - DNA, 122 bp, Homo sapiens
  misc_feature (61)..(62): /note="This region represents a CpG dinucleotide"
  misc_feature (61)..(61): /note="Nucleotide may be methylated to form 5-methylcytosine"
tgtcaccaactgggacgacatggagaagatctggcaccacaccttctacaatgagctgcgcgtggctcccgaggagcaacccatgctgctgtttgaggcccccctgaaccccagggccaact

SEQ ID NO: 3758 - DNA, 122 bp, Homo sapiens
  misc_feature (61)..(62): /note="This region represents a CpG dinucleotide"
  misc_feature (61)..(61): /note="Nucleotide may be methylated to form 5-methylcytosine"
ttgtgctcgggccttcaagagttcccacaatctggcagtgcaccggatgattcacactggcgagaagccattacagtgagtattatttactggtgaacatctgggtgagaaggatatatgcc

SEQ ID NO: 3759 - DNA, 122 bp, Homo sapiens
  misc_feature (61)..(62): /note="This region represents a CpG dinucleotide"
  misc_feature (61)..(61): /note="Nucleotide may be methylated to form 5-methylcytosine"
gctgggattgcaggcgtgagctacaaggctaccaactgactgactcaggggatgtgtctccgcttaccatagatctgtcattagcgtatataggcctcaaagagctgtaagcaaccatgtct

SEQ ID NO: 3760 - DNA, 122 bp, Homo sapiens
  misc_feature (61)..(62): /note="This region represents a CpG dinucleotide"
  misc_feature (61)..(61): /note="Nucleotide may be methylated to form 5-methylcytosine"
gtctcatccgtttatcaagtgttctgtcacaggaccggatcccctgccattctttgaatgcgtagagcaagactcaatggttgggtcatggctcactgaggaaacagtaagattccagaatc

SEQ ID NO: 3761 - DNA, 122 bp, Homo sapiens
  misc_feature (61)..(62): /note="This region represents a CpG dinucleotide"
  misc_feature (61)..(61): /note="Nucleotide may be methylated to form 5-methylcytosine"
gccgggcttctcggagggttcactgtacattcgttctcaggtggtcttgtggctgtctttcggaaaatggttattttatatgatttgtcatggaatttgttctaataaatcattcttctatc

SEQ ID NO: 3762 - DNA, 122 bp, Homo sapiens
  misc_feature (61)..(62): /note="This region represents a CpG dinucleotide"
  misc_feature (61)..(61): /note="Nucleotide may be methylated to form 5-methylcytosine"
gcgcgccctgagttccccgggagcatctgggccaatggggagcgagcggggcggggcggccgggtgctgcggagccaataagaggcggctcaagtgaaggggggcgggacttgacgagcggg

SEQ ID NO: 3763 - DNA, 122 bp, Homo sapiens
  misc_feature (61)..(62): /note="This region represents a CpG dinucleotide"
  misc_feature (61)..(61): /note="Nucleotide may be methylated to form 5-methylcytosine"
caggctccacagagtcagatcacggcttcacaccagtcgttctggtcacttaggcgttcgcgtgagcgctcaaccccttaccgccacctcatcgtcactctacaccattctgagcgcaaaaa

SEQ ID NO: 3764 - DNA, 122 bp, Homo sapiens
  misc_feature (61)..(62): /note="This region represents a CpG dinucleotide"
  misc_feature (61)..(61): /note="Nucleotide may be methylated to form 5-methylcytosine"
gtacatgggtgtggatccacttatacgtgggtttggtctgcctgggagctattcctggtgcgtgattatcaagctaatagccattaaaaatctactaatcagctccatcccagaacttgctt

SEQ ID NO: 3765 - DNA, 122 bp, Homo sapiens
  misc_feature (61)..(62): /note="This region represents a CpG dinucleotide"
  misc_feature (61)..(61): /note="Nucleotide may be methylated to form 5-methylcytosine"
agtttggctcagaagttgctgactatggttatcacctttaggtcacccttcctctctcagcgtgaaacaataacacagatcattttatatttttggatggcaccaatattaaagattttaca

SEQ ID NO: 3766 - DNA, 122 bp, Homo sapiens
  misc_feature (61)..(62): /note="This region represents a CpG dinucleotide"
  misc_feature (61)..(61): /note="Nucleotide may be methylated to form 5-methylcytosine"
ggctgtcattaaaccttaaagtttcaaaattatctcctttgacttgatgtctcacatccacgtcatgctggtgcaagaggtgggctcccaaggccttgggcagctctgcccctgtggctttg

SEQ ID NO: 3767 - DNA, 122 bp, Homo sapiens
  misc_feature (61)..(62): /note="This region represents a CpG dinucleotide"
  misc_feature (61)..(61): /note="Nucleotide may be methylated to form 5-methylcytosine"
attctgatgagacagttatgattctaggaatattcccaggataggagtccaataagtaagcggttttactattaacaagctgtgtgactttgggcaagtgagttattctctataaacctcaa

SEQ ID NO: 3768 - DNA, 122 bp, Homo sapiens
  misc_feature (61)..(62): /note="This region represents a CpG dinucleotide"
  misc_feature (61)..(61): /note="Nucleotide may be methylated to form 5-methylcytosine"
ctgcctgccacagcctcctcccccttcacaatcacaatggcttagaaagtaatgccgtttcgatagcaacaaagcaccaaattgtacaaagcagggacgacactgtgtgaggagccattcca

SEQ ID NO: 3769 - DNA, 122 bp, Homo sapiens
  misc_feature (61)..(62): /note="This region represents a CpG dinucleotide"
  misc_feature (61)..(61): /note="Nucleotide may be methylated to form 5-methylcytosine"
tatggctagtgtcctaagaagaagaggaagagaccctagggacgtacatgcagagaggaacggccatgtgaagacacaacaagaaggtgaccatctgcaagccaaggagagagacctcagga

SEQ ID NO: 3770 - DNA, 122 bp, Homo sapiens
  misc_feature (61)..(62): /note="This region represents a CpG dinucleotide"
  misc_feature (61)..(61): /note="Nucleotide may be methylated to form 5-methylcytosine"
ttctacgtctccgtactttctgttacaggtgttgctctttgtccctggatgcacggtgaccgtgagctccgagggctgcctgtctcctcactcctgcaatgctttgcaccggtgcccagttc

SEQ ID NO: 3771 - DNA, 122 bp, Homo sapiens
  misc_feature (61)..(62): /note="This region represents a CpG dinucleotide"
  misc_feature (61)..(61): /note="Nucleotide may be methylated to form 5-methylcytosine"
ccccatcatcattttcattcatcctaagaaaggcggctccctgtgtggaggtggtggccgcgaacattttggctgaactgagcagtcaaccttctcatttttgctggaaggatttgagagaa

SEQ ID NO: 3772 - DNA, 122 bp, Homo sapiens
  misc_feature (61)..(62): /note="This region represents a CpG dinucleotide"
  misc_feature (61)..(61): /note="Nucleotide may be methylated to form 5-methylcytosine"
tcttcccagctctctctgctcaatgtgctgagtgagatagtgcttctcagcctctttgaacgctttcttgtccctctgcctgcactttggttcccatcacgtcagccttgaaggtggagtgg

SEQ ID NO: 3773 - DNA, 122 bp, Homo sapiens
  misc_feature (61)..(62): /note="This region represents a CpG dinucleotide"
  misc_feature (61)..(61): /note="Nucleotide may be methylated to form 5-methylcytosine"
cacagacatgatgtccaaatgccaggaataaagtcctgaagctaagatcagaaaggtccacggtgagctatagttaaatacgtattggcccgtgatgccatcccaagggtgttgatgggcta

SEQ ID NO: 3774 - DNA, 122 bp, Homo sapiens
  misc_feature (61)..(62): /note="This region represents a CpG dinucleotide"
  misc_feature (61)..(61): /note="Nucleotide may be methylated to form 5-methylcytosine"
atgtgcatgacattgtctttgtccttgaaaaaacagctgtaatttgactaaatctgtcatcgatgttgctaaataacaagcgagaaaattacacagctgatgtaactgtgtaacttaactct

SEQ ID NO: 3775 - DNA, 122 bp, Homo sapiens
  misc_feature (61)..(62): /note="This region represents a CpG dinucleotide"
  misc_feature (61)..(61): /note="Nucleotide may be methylated to form 5-methylcytosine"
cagcaagtaagtggcgaagccaggatttgaacccaggctgtccggctttaagcctggctgcgtctgttgagtgagaggatgcagcgtgagaagaggaagaatgggaaacagccttgggaggg

SEQ ID NO: 3776 - DNA, 122 bp, Homo sapiens
  misc_feature (61)..(62): /note="This region represents a CpG dinucleotide"
  misc_feature (61)..(61): /note="Nucleotide may be methylated to form 5-methylcytosine"
taaatggcattaggaaagctagttggcctcaccagcctcagtttcctggggataataatccgtgctcctcggaagctgttgagaagactgaatgagaggcctacatttgtagctcagaacct

SEQ ID NO: 3777 - DNA, 122 bp, Homo sapiens
  misc_feature (61)..(62): /note="This region represents a CpG dinucleotide"
  misc_feature (61)..(61): /note="Nucleotide may be methylated to form 5-methylcytosine"
aaatcaactgatccagccagccagcatccaggtgaactgtccctccaggcagtgatctaacggatggctggaaataagcccagagctcactcaggtgcctgcatgtctaccaataaaagctg

SEQ ID NO: 3778 - DNA, 122 bp, Homo sapiens
  misc_feature (61)..(62): /note="This region represents a CpG dinucleotide"
  misc_feature (61)..(61): /note="Nucleotide may be methylated to form 5-methylcytosine"
gtcatggcaagaacaattaatcctgtggtgttagagagccaacaaaaatttttgttaggacggtatcaggcttgattttttaattagataattctgtgtacagtataaaaaatggctttaaa

SEQ ID NO: 3779 - DNA, 122 bp, Homo sapiens
  misc_feature (61)..(62): /note="This region represents a CpG dinucleotide"
  misc_feature (61)..(61): /note="Nucleotide may be methylated to form 5-methylcytosine"
cctctatagtagtttttttccagtagtaattgcatttcccccttttggaagaaagaaattcgagctttgtgggcttccaagaaaatttcagccaattaagtgaatgagagctgaagggacta

SEQ ID NO: 3780 - DNA, 122 bp, Homo sapiens
  misc_feature (61)..(62): /note="This region represents a CpG dinucleotide"
  misc_feature (61)..(61): /note="Nucleotide may be methylated to form 5-methylcytosine"
tagcctaggtgtacaggaagccataccatctaggtctctggaagtacactcaaagatgttcgcacaatgacgaaatcgcctaccaactcatttctcagaacataaccctgctgttaagcaat

SEQ ID NO: 3781 - DNA, 122 bp, Homo sapiens
  misc_feature (61)..(62): /note="This region represents a CpG dinucleotide"
  misc_feature (61)..(61): /note="Nucleotide may be methylated to form 5-methylcytosine"
ctcaagtgatccacctgccttggcctcccaaggtgttgggattacaggcatgagctaccacgcctgacctgattattgttcttgttgcattatttctgactggtggctgtctttaaatctca

SEQ ID NO: 3782 - DNA, 122 bp, Homo sapiens
  misc_feature (61)..(62): /note="This region represents a CpG dinucleotide"
  misc_feature (61)..(61): /note="Nucleotide may be methylated to form 5-methylcytosine"
ctggagctttgtaattcctattatggtacttagcttgggaaattgtctatgaatcaaaaacgcagcaaattggatatcaaccagatgcaagctagaaggccagtattcagttactaaaagtc

SEQ ID NO: 3783 - DNA, 122 bp, Homo sapiens
  misc_feature (61)..(62): /note="This region represents a CpG dinucleotide"
  misc_feature (61)..(61): /note="Nucleotide may be methylated to form 5-methylcytosine"
agtcacttaacttctctagatgccaatctccttctcaataaagaaatcattggccgggtacggtggctcatgcctgtaatcccagcactttgggagcctgaggcaggcagatcacttgaggc

SEQ ID NO: 3784 - DNA, 122 bp, Homo sapiens
  misc_feature (61)..(62): /note="This region represents a CpG dinucleotide"
  misc_feature (61)..(61): /note="Nucleotide may be methylated to form 5-methylcytosine"
cccacatgggcacgcagtccatgtgtgttgaacgagcttcctgctgtggagcaggatgagcgcgggatgtggagtccagacgcggtctgctgctcacctgcgacctcagtttccctgtgcca

SEQ ID NO: 3785 - DNA, 122 bp, Homo sapiens
  misc_feature (61)..(62): /note="This region represents a CpG dinucleotide"
  misc_feature (61)..(61): /note="Nucleotide may be methylated to form 5-methylcytosine"
tggtgtagtgagacttttcgcattatagggcccaactagagatccagtcatttttacttacgctgtgagccaagattctgagtaaatgggtttatcttgattgcagttaaagtatctggttg

SEQ ID NO: 3786 - DNA, 122 bp, Homo sapiens
  misc_feature (61)..(62): /note="This region represents a CpG dinucleotide"
  misc_feature (61)..(61): /note="Nucleotide may be methylated to form 5-methylcytosine"
aattaattgtctaaggggcaaataaatggtgcagtacacaaatgcaggaggtgacacaaacgcacctggattcaacagaggacaagtagacacatctatgtcccaggctgcactaatgagga

SEQ ID NO: 3787 - DNA, 122 bp, Homo sapiens
  misc_feature (61)..(62): /note="This region represents a CpG dinucleotide"
  misc_feature (61)..(61): /note="Nucleotide may be methylated to form 5-methylcytosine"
tttgtcttactagttaaatcctcacctaatctcttgggtatgaatataaatgtgtgtcatcgttatattgttcagctagatgagcaagtatcttagggtagtaggtagcctggtggttttag

SEQ ID NO: 3788 - DNA, 122 bp, Homo sapiens
  misc_feature (61)..(62): /note="This region represents a CpG dinucleotide"
  misc_feature (61)..(61): /note="Nucleotide may be methylated to form 5-methylcytosine"
tgcctgccgattggtccatgactggccatgggtgggcctagaggagataccacatgtccccgctccagtctgtgggactggcagctgggcccccagccttcaaggcttccctggcctgaagg

SEQ ID NO: 3789 - DNA, 122 bp, Homo sapiens
  misc_feature (61)..(62): /note="This region represents a CpG dinucleotide"
  misc_feature (61)..(61): /note="Nucleotide may be methylated to form 5-methylcytosine"
acagccagtgaccagaggctgcttgttctacaagaaagagcactgtcctagccttggggacgcaactagcagagtgaccagagcaaaccatccataaaattatgaccaggccaggcgcagtg

SEQ ID NO: 3790 - DNA, 122 bp, Homo sapiens
  misc_feature (61)..(62): /note="This region represents a CpG dinucleotide"
  misc_feature (61)..(61): /note="Nucleotide may be methylated to form 5-methylcytosine"
atgtgtgccaggcattgttttagaggttatagtggagtttcagagaggatccgctgttcacgtggtgttttaccggggtatactcatgaacaacaaataaccaccggttttaccaaggcata

SEQ ID NO: 3791 - DNA, 122 bp, Homo sapiens
  misc_feature (61)..(62): /note="This region represents a CpG dinucleotide"
  misc_feature (61)..(61): /note="Nucleotide may be methylated to form 5-methylcytosine"
gtaggaaaaaatatgtttctatctttgaatttacaaaaatcaacaaaaacatacaaaatacgggagatattacctagcagtatgtgtgaattttcttgacgttagttaatagtaatctcatc

SEQ ID NO: 3792 - DNA, 122 bp, Homo sapiens
  misc_feature (61)..(62): /note="This region represents a CpG dinucleotide"
  misc_feature (61)..(61): /note="Nucleotide may be methylated to form 5-methylcytosine"
aatgaagaaaggagaacatttaaaaactactcaccaagtctggattctccgcaaagccaacgctgacatgatttggttgccaatacgtttgctgggaggtgatcccaggaagcatggcgaaa

SEQ ID NO: 3793 - DNA, 122 bp, Homo sapiens
  misc_feature (61)..(62): /note="This region represents a CpG dinucleotide"
  misc_feature (61)..(61): /note="Nucleotide may be methylated to form 5-methylcytosine"
tgggcccccaggacctggcacaggctgtggttccttatatcgagtggcatgactgcattccggcctttgccgttgactcattctttgcccttgtcaagtttcctagcctgagtcggtttttc

SEQ ID NO: 3794 - DNA, 122 bp, Homo sapiens
  misc_feature (61)..(62): /note="This region represents a CpG dinucleotide"
  misc_feature (61)..(61): /note="Nucleotide may be methylated to form 5-methylcytosine"
ttccaacaaaggcaggcgaaatgtggaaccaattatatctgggtgcctacacgtgacgtacgccagttctttgtagaaagaacgaggcttgtctcagcgatactaatgtacagttcacatga

SEQ ID NO: 3795 - DNA, 122 bp, Homo sapiens
  misc_feature (61)..(62): /note="This region represents a CpG dinucleotide"
  misc_feature (61)..(61): /note="Nucleotide may be methylated to form 5-methylcytosine"
tatttatctttgcagaaggcagtatcttaaccaccacatagtagcattaatctgtcacatcgtcccgaacatgcaagacactatttgttattgaagaggagacttctttatggaaggatatt

SEQ ID NO: 3796 - DNA, 122 bp, Homo sapiens
  misc_feature (61)..(62): /note="This region represents a CpG dinucleotide"
  misc_feature (61)..(61): /note="Nucleotide may be methylated to form 5-methylcytosine"
aagccacagtaaccattccatcaagtgaatgttaagcttctcttaccagctcttaacaagcgcataagacccacttaataccgtgactagatgggaaataccaaggtgatgacagaggaaac

SEQ ID NO: 3797 - DNA, 122 bp, Homo sapiens
  misc_feature (61)..(62): /note="This region represents a CpG dinucleotide"
  misc_feature (61)..(61): /note="Nucleotide may be methylated to form 5-methylcytosine"
tgtaccaatgggtggcaataatacattcacccagaataactccacaggagggccttatcccgcctcgccttgcatatgttgaaaccagggcatggtttcctataaaaatgcttactgtgcag

SEQ ID NO: 3798 - DNA, 122 bp, Homo sapiens
  misc_feature (61)..(62): /note="This region represents a CpG dinucleotide"
  misc_feature (61)..(61): /note="Nucleotide may be methylated to form 5-methylcytosine"
atccatcaccaggtcgtcccctcctcctcttcctctccccttccttcctcgctgcctcgccgcctccccgccgcccttacctgtagccatctgattgtaatggactaccgagtcgctgctgc

SEQ ID NO: 3799 - DNA, 122 bp, Homo sapiens
  misc_feature (61)..(62): /note="This region represents a CpG dinucleotide"
  misc_feature (61)..(61): /note="Nucleotide may be methylated to form 5-methylcytosine"
cctctgggagagtgtggggccccaaaggttactaatgaaatcggaaactccctgttactccgtcgctttcctctaggccctgtctcggcactttgccagtagcttgggtagaaagaatagca

SEQ ID NO: 3800 - DNA, 122 bp, Homo sapiens
  misc_feature (61)..(62): /note="This region represents a CpG dinucleotide"
  misc_feature (61)..(61): /note="Nucleotide may be methylated to form 5-methylcytosine"
agtcaggtggcctgggctcctccaccctcgctaacagctaactccatggccatggacacacgcttgtgccacaggtgcagactttctaaagacttaggttttggagatctctctggtctccg

SEQ ID NO: 3801 - DNA, 122 bp, Homo sapiens
  misc_feature (61)..(62): /note="This region represents a CpG dinucleotide"
  misc_feature (61)..(61): /note="Nucleotide may be methylated to form 5-methylcytosine"
ggggcccccttgctgtgtgcagcctagggacttggtgtcctgcataccacctgctccagccgtggctcaaaggggccaaggtacagcttgggctgtggcttcagagggtgcaagcctcaagc

SEQ ID NO: 3802 - DNA, 122 bp, Homo sapiens
  misc_feature (61)..(62): /note="This region represents a CpG dinucleotide"
  misc_feature (61)..(61): /note="Nucleotide may be methylated to form 5-methylcytosine"
acaagattagagccaaaccagtcagtcaactgttggtctttttcacgttttactaatactcgtataactagtaagtttcctggcaggttccagttggaaaaactcgagggtaacatcaaatt

SEQ ID NO: 3803 - DNA, 122 bp, Homo sapiens
  misc_feature (61)..(62): /note="This region represents a CpG dinucleotide"
  misc_feature (61)..(61): /note="Nucleotide may be methylated to form 5-methylcytosine"
tgaaatctcaatcacatgactgtaaaataacaaaatcggtgtgaagtaggtataaatccacgcagaaaaaaagaatgagaggaagataacagcagactagagattcaacagaattctggaag

SEQ ID NO: 3804 - DNA, 122 bp, Homo sapiens
  misc_feature (61)..(62): /note="This region represents a CpG dinucleotide"
  misc_feature (61)..(61): /note="Nucleotide may be methylated to form 5-methylcytosine"
acgccaggcaggacttccgtcgcaccgccgccgccgcccgcgcccattggccgcgcccatcgtcccttcgccgcggtctgagtgggccccgcctctgccccagctgcatttccgggttgggg

SEQ ID NO: 3805 - DNA, 122 bp, Homo sapiens
  misc_feature (61)..(62): /note="This region represents a CpG dinucleotide"
  misc_feature (61)..(61): /note="Nucleotide may be methylated to form 5-methylcytosine"
ctgctattctggcagcactgtctgctcagtagtcctgagtgctgcacacataggacgtggcgctgctgaatggtaatccggaattcacaaaatgctgacggaggcagtaaactgatagtcac

SEQ ID NO: 3806 - DNA, 122 bp, Homo sapiens
  misc_feature (61)..(62): /note="This region represents a CpG dinucleotide"
  misc_feature (61)..(61): /note="Nucleotide may be methylated to form 5-methylcytosine"
gggcacaggagccagggaatgggatgagaaatgttccttgcaatgccggaagccctttcccgaagtcacacattttcatgaataaactagggatgagttaagctggatgttagagttggatt

SEQ ID NO: 3807 - DNA, 122 bp, Homo sapiens
  misc_feature (61)..(62): /note="This region represents a CpG dinucleotide"
  misc_feature (61)..(61): /note="Nucleotide may be methylated to form 5-methylcytosine"
aacactggcagcacctattgaggccatgtttcaggatcagaccatgctggtttgagcagacgcagcaagagtgagaaccccggccgaattttcatgggtggctctagtagagctgctggtga

SEQ ID NO: 3808 - DNA, 122 bp, Homo sapiens
  misc_feature (61)..(62): /note="This region represents a CpG dinucleotide"
  misc_feature (61)..(61): /note="Nucleotide may be methylated to form 5-methylcytosine"
acactgaagcagcaaaaaattaaatcaaaaaatacgaagagataaataagaaaagggtagcgtgatcatgattactgtcactggatttactggtctgtctcagccataggtaccaggacatt

SEQ ID NO: 3809 - DNA, 122 bp, Homo sapiens
  misc_feature (61)..(62): /note="This region represents a CpG dinucleotide"
  misc_feature (61)..(61): /note="Nucleotide may be methylated to form 5-methylcytosine"
atgtatattccttacgtctattttcccagggactgactccttttaaataagcatctcaggcgggcgcggtggctcacacctgtaatcccagcactttgcagggcggaggtgggcggatcacc

SEQ ID NO: 3810 - DNA, 122 bp, Homo sapiens
  misc_feature (61)..(62): /note="This region represents a CpG dinucleotide"
  misc_feature (61)..(61): /note="Nucleotide may be methylated to form 5-methylcytosine"
tacaaaagaaacaattatcattcaagtatttaatcttctgttcaagaacacacaggacatcgccaaacctaaatttcctttgcatgccagccaactggaatctggtactggcaagttacata

SEQ ID NO: 3811 - DNA, 122 bp, Homo sapiens
  misc_feature (61)..(62): /note="This region represents a CpG dinucleotide"
  misc_feature (61)..(61): /note="Nucleotide may be methylated to form 5-methylcytosine"
aaacatacgtgcgatttttcttttggccaaacactttgctctattcgactgttttgtcttcgttttctgcaacccattttcctcctttggttcctgttgcaaaacaagaaatatcatcagtg

SEQ ID NO: 3812 - DNA, 122 bp, Homo sapiens
  misc_feature (61)..(62): /note="This region represents a CpG dinucleotide"
  misc_feature (61)..(61): /note="Nucleotide may be methylated to form 5-methylcytosine"
aggctgagttacaagcatccagatatgagcaatcctatagttcatactccatgattcttgcgggaggtctttgtagacagaagctttactaaaagataaaagcagtaggagatcgttaaaac

SEQ ID NO: 3813 - DNA, 122 bp, Homo sapiens
  misc_feature (61)..(62): /note="This region represents a CpG dinucleotide"
  misc_feature (61)..(61): /note="Nucleotide may be methylated to form 5-methylcytosine"
actatagtcactaacctcatactttcaatcatagcatttctacctatagaatgtttacttcgtttgagagtcacttcataagaaagagggtgtttggctgtggtttgagaaggattaattgt

SEQ ID NO: 3814 - DNA, 122 bp, Homo sapiens
  misc_feature (61)..(62): /note="This region represents a CpG dinucleotide"
  misc_feature (61)..(61): /note="Nucleotide may be methylated to form 5-methylcytosine"
cttcaacccgacttagctcatctctcaagttgccaacctgcctctgtgttgaagtggtgacgtggaattttccattgctaaagacttacagatgtttggcttacaaatccaagagagaggga

SEQ ID NO: 3815 - DNA, 122 bp, Homo sapiens
  misc_feature (61)..(62): /note="This region represents a CpG dinucleotide"
  misc_feature (61)..(61): /note="Nucleotide may be methylated to form 5-methylcytosine"
tgataattatactgcacctggatgcctcttacctctggacttaatgttatgtgaggcaatcgatttccttattcttatgaaaaccagtttctgtgaaactgatcagtatcaagcatgaagca

SEQ ID NO: 3816 - DNA, 122 bp, Homo sapiens
  misc_feature (61)..(62): /note="This region represents a CpG dinucleotide"
  misc_feature (61)..(61): /note="Nucleotide may be methylated to form 5-methylcytosine"
aaccaccatcaccatccatctccagaaagatttcatcaacacaccatgtttcaaacttctcgattttataaagtgcctctcattcaaatagtaacagctgaagaaaaaaatgcaggtaccat

SEQ ID NO: 3817 - DNA, 122 bp, Homo sapiens
  misc_feature (61)..(62): /note="This region represents a CpG dinucleotide"
  misc_feature (61)..(61): /note="Nucleotide may be methylated to form 5-methylcytosine"
ggcgccagtgcccccgccgctgggcagccctctggccaccgcgcactcggagctgcccttcgccgccgccgacccctactcgcccgccgcgctgcatggccacctgcaccagggcgccacgg

SEQ ID NO: 3818 - DNA, 122 bp, Homo sapiens
  misc_feature (61)..(62): /note="This region represents a CpG dinucleotide"
  misc_feature (61)..(61): /note="Nucleotide may be methylated to form 5-methylcytosine"
gttggaaaagaaaagagataaaaacacctatttcacaagtttcacgggacctgacctttgcgcaagagcaaaaaatttccccagttgaggtaaataaggttcccacaagctttttttccttt

SEQ ID NO: 3819 - DNA, 122 bp, Homo sapiens
  misc_feature (61)..(62): /note="This region represents a CpG dinucleotide"
  misc_feature (61)..(61): /note="Nucleotide may be methylated to form 5-methylcytosine"
gaatcaccaaattgttttccacagtggttacacccatgttacatttccaccagcaatgcacgagggttctaatttctccacatcctcaccatcacttgttattatctgttttcttttttaat

SEQ ID NO: 3820 - DNA, 122 bp, Homo sapiens
  misc_feature (61)..(62): /note="This region represents a CpG dinucleotide"
  misc_feature (61)..(61): /note="Nucleotide may be methylated to form 5-methylcytosine"
gaaagacgagatcctgggcatcgccaacaaccgactgatccgcatcgacttggccgtgggcgacgtggtcaagacctggcgtttcagcaacatgcgccagtggaatgtcaactgggacatcc

SEQ ID NO: 3821 - DNA, 122 bp, Homo sapiens
  misc_feature (61)..(62): /note="This region represents a CpG dinucleotide"
  misc_feature (61)..(61): /note="Nucleotide may be methylated to form 5-methylcytosine"
cccaaagatacaggtgactctgtctcattatatgcttaggtttgatgaaacagggacagtcgtgtagaaatgtgattggacaacaaaggatatgagctaatggtaatagaaaacctagcaag

SEQ ID NO: 3822 - DNA, 122 bp, Homo sapiens
  misc_feature (61)..(62): /note="This region represents a CpG dinucleotide"
  misc_feature (61)..(61): /note="Nucleotide may be methylated to form 5-methylcytosine"
cctcaattgttaggtgatatctgctatagtcatgatcaagtccacggcaagatccaggtccgtatttttcataccaacccttgatttttctctctaattcagcatttgcctcctccagagct

SEQ ID NO: 3823 - DNA, 122 bp, Homo sapiens
  misc_feature (61)..(62): /note="This region represents a CpG dinucleotide"
  misc_feature (61)..(61): /note="Nucleotide may be methylated to form 5-methylcytosine"
ctctttgtctgtagtcagtgtggaaatgccttcagtgaccatttatcctttaaacaacaccgtgaattaacactggagagaagccatatgaatatgatctgtgtgggaaagccttcatttaa

SEQ ID NO: 3824 - DNA, 122 bp, Homo sapiens
  misc_feature (61)..(62): /note="This region represents a CpG dinucleotide"
  misc_feature (61)..(61): /note="Nucleotide may be methylated to form 5-methylcytosine"
gaggagaagtggggctaaaattcaatgcgtgctctgccgccagccaaggccctgatgtggcgttgcatcttccggaaagggaaggccttttataaaccacacaaaagtgcaatctgttcgcc

SEQ ID NO: 3825 - DNA, 122 bp, Homo sapiens
  misc_feature (61)..(62): /note="This region represents a CpG dinucleotide"
  misc_feature (61)..(61): /note="Nucleotide may be methylated to form 5-methylcytosine"
tctggatgaggccttggcttcctctccaagtgcattaaggccggagagtgacatctgattcgcatgttaaaatgctagctgtgatagtacagaacagtctatgggggcatggggatggggga

SEQ ID NO: 3826 - DNA, 122 bp, Homo sapiens
  misc_feature (61)..(62): /note="This region represents a CpG dinucleotide"
  misc_feature (61)..(61): /note="Nucleotide may be methylated to form 5-methylcytosine"
agaaactaaggtctttgccatttgactctactcatgctacggcagcagactgcatcttctcgctctttagtggtaatccacattgctgggtccctcccacttttcttaataaccactggcgg

SEQ ID NO: 3827 - DNA, 122 bp, Homo sapiens
  misc_feature (61)..(62): /note="This region represents a CpG dinucleotide"
  misc_feature (61)..(61): /note="Nucleotide may be methylated to form 5-methylcytosine"
tagcagaggaagagaattgctattttggggcatattttaactccaataggtaggcattatcgtccccatattgcagatgaggaaactgaggatcagagagtttaagtagcttgtctggtgtc

SEQ ID NO: 3828 - DNA, 122 bp, Homo sapiens
  misc_feature (61)..(62): /note="This region represents a CpG dinucleotide"
  misc_feature (61)..(61): /note="Nucleotide may be methylated to form 5-methylcytosine"
tttcctcccctgcccccaattatttcaattgtccttgtctcttatattcctattttcttccgtaggctaatttgagagactgcattgtttctctttcccttttggaagttgagggtggcccg

SEQ ID NO: 3829 - DNA, 122 bp, Homo sapiens
  misc_feature (61)..(62): /note="This region represents a CpG dinucleotide"
  misc_feature (61)..(61): /note="Nucleotide may be methylated to form 5-methylcytosine"
atgtactcattctcccggtccacgtcttcagcactgacctctggctctggtatgatgtgacgtactttcctgcaggaggacagggctcagacattggggcccctctgaccaccctgcagctc

SEQ ID NO: 3830 - DNA, 122 bp, Homo sapiens
  misc_feature (61)..(62): /note="This region represents a CpG dinucleotide"
  misc_feature (61)..(61): /note="Nucleotide may be methylated to form 5-methylcytosine"
tgtctccctggggagcaaggcaggctggcctccgccagggctgccctcgggaggtgctgccgggactgtctcagcaggaagaatggccctggcttgtcacccacccaaagaccctctgccag

SEQ ID NO: 3831 - DNA, 122 bp, Homo sapiens
  misc_feature (61)..(62): /note="This region represents a CpG dinucleotide"
  misc_feature (61)..(61): /note="Nucleotide may be methylated to form 5-methylcytosine"
tacgaaaagttatgtgcccctgattttactataaaattcatcacattttgaagtgtcctgcggttttacaacattttttaaatattgtattaaaaacagcttcttagctttttaaataaaga

SEQ ID NO: 3832 - DNA, 122 bp, Homo sapiens
  misc_feature (61)..(62): /note="This region represents a CpG dinucleotide"
  misc_feature (61)..(61): /note="Nucleotide may be methylated to form 5-methylcytosine"
tcaccttaaagatgatgtcacctctttaaaaaaggcactatgtgcttagggctcctagcacgtttcccctacttacagaaaatcctacctacctacggtcaggtacaaacatgaaagaggat

SEQ ID NO: 3833 - DNA, 122 bp, Homo sapiens
  misc_feature (61)..(62): /note="This region represents a CpG dinucleotide"
  misc_feature (61)..(61): /note="Nucleotide may be methylated to form 5-methylcytosine"
tatgcatggagtgcattcttgtctcgcggaactctgcacacatagtaaatattttgctgtcggtttatcttggcttccacatgtctctctgtctcagctgcccttggtctgtggtatgtggc

SEQ ID NO: 3834 - DNA, 122 bp, Homo sapiens
  misc_feature (61)..(62): /note="This region represents a CpG dinucleotide"
  misc_feature (61)..(61): /note="Nucleotide may be methylated to form 5-methylcytosine"
agagggcccctcacttcacagatgaggaacttgaggcaagtcaccagcccctgatcatttcgcctaaaagagcaaggactagagttcctgacctccaggccagtccctgatccctgacctaa

SEQ ID NO: 3835 - DNA, 122 bp, Homo sapiens
  misc_feature (61)..(62): /note="This region represents a CpG dinucleotide"
  misc_feature (61)..(61): /note="Nucleotide may be methylated to form 5-methylcytosine"
atgtgaataagataaaaatttaaaagccagatcacagtattttcttcccatgaagctctccggttgtggaggagttttacccttaaatctaccctaatccttataatacgacttagttgtgc

SEQ ID NO: 3836 - DNA, 122 bp, Homo sapiens
  misc_feature (61)..(62): /note="This region represents a CpG dinucleotide"
  misc_feature (61)..(61): /note="Nucleotide may be methylated to form 5-methylcytosine"
tcctcacactacctggtatagcgagcaggtgtcgctggagatgagggaggcagctgccaccgagttccgccgagccatcaaaggtcgcatcccagaaagcttaagaaactgtgtgaacaagg

SEQ ID NO: 3837 - DNA, 122 bp, Homo sapiens
  misc_feature (61)..(62): /note="This region represents a CpG dinucleotide"
  misc_feature (61)..(61): /note="Nucleotide may be methylated to form 5-methylcytosine"
taaaaaaatgcaggcttagtaacacttgttctgagtcctttaacatccagatgttaacttcgatgaacacttgattactaaatgtgcaataacattttctgcctttaaattcagtgactagt

SEQ ID NO: 3838 - DNA, 122 bp, Homo sapiens
  misc_feature (61)..(62): /note="This region represents a CpG dinucleotide"
  misc_feature (61)..(61): /note="Nucleotide may be methylated to form 5-methylcytosine"
tttgttttgcagctgtctcaatgtgctttacttgggatgaggcaggtggcggagagcggccggaaagactctataacccagttctgggaagaactccaagctgggagtcagtcacactgact

SEQ ID NO: 3839 - DNA, 122 bp, Homo sapiens
  misc_feature (61)..(62): /note="This region represents a CpG dinucleotide"
  misc_feature (61)..(61): /note="Nucleotide may be methylated to form 5-methylcytosine"
ctgcacttacagaaggggtggggaaagagtgatcacagtgacttcgctgcacagccacagcggggatgagacagcaagtgctaaacagctgcacgaattcgtttgcatttactatgtttcaa

SEQ ID NO: 3840 - DNA, 122 bp, Homo sapiens
  misc_feature (61)..(62): /note="This region represents a CpG dinucleotide"
  misc_feature (61)..(61): /note="Nucleotide may be methylated to form 5-methylcytosine"
aataaaataccatcatatcctaagctttcctgcattcctggtggttagaatgtactgttccgtacttgccacataaatctttgctgaattagcaaactgttcccatttgactgattgcatga

SEQ ID NO: 3841 - DNA, 122 bp, Homo sapiens
  misc_feature (61)..(62): /note="This region represents a CpG dinucleotide"
  misc_feature (61)..(61): /note="Nucleotide may be methylated to form 5-methylcytosine"
caagttttaggtggatgaactcttagaacagtgccagaataaaaggctacctgtatttcacgaagattcgtgacaaaaagttaagagcattgtgcaatatgctggtaatgatcaaatgggca

SEQ ID NO: 3842 - DNA, 122 bp, Homo sapiens
  misc_feature (61)..(62): /note="This region represents a CpG dinucleotide"
  misc_feature (61)..(61): /note="Nucleotide may be methylated to form 5-methylcytosine"
aaaccagtagtggcatactgttatttacatctcttcccagctccacagtgtgtgacttcacgttagtagctggaaatcagctgtggtgggagtatttatatcatgaaaatctggatatgaga

SEQ ID NO: 3843 - DNA, 122 bp, Homo sapiens
  misc_feature (61)..(62): /note="This region represents a CpG dinucleotide"
  misc_feature (61)..(61): /note="Nucleotide may be methylated to form 5-methylcytosine"
ataaaagggtaactttcaatttctggctgatttttatatttcagattccacccatcaacacggaggccaaggaaaatttaatgagccaaataacttatggctcttcaaattacaagatctgt

SEQ ID NO: 3844 - DNA, 122 bp, Homo sapiens
  misc_feature (61)..(62): /note="This region represents a CpG dinucleotide"
  misc_feature (61)..(61): /note="Nucleotide may be methylated to form 5-methylcytosine"
ggaaggaagaagccaacatttattaaggtcctattgtgtggcaggcacattcgcaagcatcgcttccggccagcccttggccctgtgaggtgcacttgcattgagccgtcattgtggggatg

SEQ ID NO: 3845 - DNA, 122 bp, Homo sapiens
  misc_feature (61)..(62): /note="This region represents a CpG dinucleotide"
  misc_feature (61)..(61): /note="Nucleotide may be methylated to form 5-methylcytosine"
ctttatcaggagcgtgaaaacagactgataaaccaaataccatgcttctccaaagcactccgcccctggtatatttccgggagataagcccgtttttcatatgagaacagtgagctccaagg

SEQ ID NO: 3846 - DNA, 122 bp, Homo sapiens
  misc_feature (61)..(62): /note="This region represents a CpG dinucleotide"
  misc_feature (61)..(61): /note="Nucleotide may be methylated to form 5-methylcytosine"
aatggcagggcgctgttgagtgcagcggggcggggccgggcgcgggggtggggcgagcggcgggcggggcggggcggccggccggggggtgggaggagaggggcggggcgggccggccgggg

SEQ ID NO: 3847 - DNA, 122 bp, Homo sapiens
  misc_feature (61)..(62): /note="This region represents a CpG dinucleotide"
  misc_feature (61)..(61): /note="Nucleotide may be methylated to form 5-methylcytosine"
ctgttcctccctggcacaatgtaaaacacttagctgtgtaatccaagtgttgactggcctcgctgcctgaaatataatgagaatgagataacatcagctttaaaaaaaactgttgtaaaata

SEQ ID NO: 3848 - DNA, 122 bp, Homo sapiens
  misc_feature (61)..(62): /note="This region represents a CpG dinucleotide"
  misc_feature (61)..(61): /note="Nucleotide may be methylated to form 5-methylcytosine"
taatccagactttacttgcaaaatccgttaaagcattaagagttctcccttcgccaggtgcggtggctcatgcctgtaatcccagcaatttgggaggccgagacgggctgatcacttgaggt

SEQ ID NO: 3849 - DNA, 122 bp, Homo sapiens
  misc_feature (61)..(62): /note="This region represents a CpG dinucleotide"
  misc_feature (61)..(61): /note="Nucleotide may be methylated to form 5-methylcytosine"
caggcctcatgtgggccatgtgtgtgttttcctggaagctgcatataggacactcattgacggggagcccgtggtctggagctagtagtgagatggtaaacattatggaacaagcagccctt

SEQ ID NO: 3850 - DNA, 122 bp, Homo sapiens
  misc_feature (61)..(62): /note="This region represents a CpG dinucleotide"
  misc_feature (61)..(61): /note="Nucleotide may be methylated to form 5-methylcytosine"
ggagtgggtgtccatagcactgagttagcccagtgtcccccagggtatagcgggagtgggcgttcgctgagcccagctttgggttgttgctcggcagtgcaggcagagcccattgttgcatt

SEQ ID NO: 3851 - DNA, 122 bp, Homo sapiens
  misc_feature (61)..(62): /note="This region represents a CpG dinucleotide"
  misc_feature (61)..(61): /note="Nucleotide may be methylated to form 5-methylcytosine"
ctcttggtcctgtggctctgcattggcctgccagaatcaacaatgatgtctgggagctgacgtgtcttggctgaagtcagcattcaaggcgattatctaggtcactgcagcctagagcagct

SEQ ID NO: 3852 - DNA, 122 bp, Homo sapiens
  misc_feature (61)..(62): /note="This region represents a CpG dinucleotide"
  misc_feature (61)..(61): /note="Nucleotide may be methylated to form 5-methylcytosine"
atcttaactgtctacattagacctttgcttttggccttctctgggactggaattcctaaccgtatgagtaaaatcctcgtgtcctgcctggcacacagtgctagtgagctctaccattgtac

SEQ ID NO: 3853 - DNA, 122 bp, Homo sapiens
  misc_feature (61)..(62): /note="This region represents a CpG dinucleotide"
  misc_feature (61)..(61): /note="Nucleotide may be methylated to form 5-methylcytosine"
aaatataataaaaactagttttcagtgcttgctttggcagcacatgtactaaaattggaacgatatagagaagattagcatggaccctgagcaaggatgacaggcaaatttgtgaaccattc

SEQ ID NO: 3854 - DNA, 122 bp, Homo sapiens
  misc_feature (61)..(62): /note="This region represents a CpG dinucleotide"
  misc_feature (61)..(61): /note="Nucleotide may be methylated to form 5-methylcytosine"
atcctccccgttctcccagggagtgcctgctggcagggagcagtgctctgctattccacgcggtaagtctcatcaagcaggccctcctagatgcctatgactgggtaaataagtctgcctaa

SEQ ID NO: 3855 - DNA, 122 bp, Homo sapiens
  misc_feature (61)..(62): /note="This region represents a CpG dinucleotide"
  misc_feature (61)..(61): /note="Nucleotide may be methylated to form 5-methylcytosine"
tttagcttcagtttgcagccaaccctttcgctttcagagtgaggattcagttcattggcgcggttgtgtctggcggcgtcagcacccctgtgacaggcagcctttctccgggcttagagcgt

SEQ ID NO: 3856 - DNA, 122 bp, Homo sapiens
  misc_feature (61)..(62): /note="This region represents a CpG dinucleotide"
  misc_feature (61)..(61): /note="Nucleotide may be methylated to form 5-methylcytosine"
gaccggtgcttgttttagtgtgcctggcacaggatttttgtctgacttggccccagcctgcgcactgactgcccatcccgcaccccatgaccaagttttccctggatacatgatttttttta

SEQ ID NO: 3857 - DNA, 122 bp, Homo sapiens
  misc_feature (61)..(62): /note="This region represents a CpG dinucleotide"
  misc_feature (61)..(61): /note="Nucleotide may be methylated to form 5-methylcytosine"
tgaaccgacagcacaattcttgtatcagcaccgtgctttggaggagttgtcaagtcactccgcatttgtgtgtccttttggtataatatttgaggaaatacctgaagtctctgggctacact

SEQ ID NO: 3858 - DNA, 122 bp, Homo sapiens
  misc_feature (61)..(62): /note="This region represents a CpG dinucleotide"
  misc_feature (61)..(61): /note="Nucleotide may be methylated to form 5-methylcytosine"
tcatttaaaatcatgttggtcagggagccagacagtcagatggctacctcagtgccccaccgcaagtttccgcaaagcactcagggcacaaaccccagaatgctgatgagacttcatgcaca

SEQ ID NO: 3859 - DNA, 122 bp, Homo sapiens
  misc_feature (61)..(62): /note="This region represents a CpG dinucleotide"
  misc_feature (61)..(61): /note="Nucleotide may be methylated to form 5-methylcytosine"
taggctaccaagaagaactgcatcttcaacaggtttgtgctcagtcattagttttccacacgttctttcagaatgatgtgttgaataaaatacatcattgcacaaatctttgtcaaagagat

SEQ ID NO: 3860 - DNA, 122 bp, Homo sapiens
  misc_feature (61)..(62): /note="This region represents a CpG dinucleotide"
  misc_feature (61)..(61): /note="Nucleotide may be methylated to form 5-methylcytosine"
tttagtttcatttgtccccagaggttggaaactatgacccacagactaaatccagcctgtcgcctgcttttgtaaataaaattttgttggaacacagccatactcttttgtttacatgcctg

SEQ ID NO: 3861 - DNA, 122 bp, Homo sapiens
  misc_feature (61)..(62): /note="This region represents a CpG dinucleotide"
  misc_feature (61)..(61): /note="Nucleotide may be methylated to form 5-methylcytosine"
ataacactgagggcacttaaaaaagctggaagtgtgtatggagatgttttatgctctgcacgtcacatgtgtatggcttagtgagatttgtcctaatgacttctcagagcagttccaagtgt

SEQ ID NO: 3862 - DNA, 122 bp, Homo sapiens
  misc_feature (61)..(62): /note="This region represents a CpG dinucleotide"
  misc_feature (61)..(61): /note="Nucleotide may be methylated to form 5-methylcytosine"
tttgactcatgcgttacagaaggtccagccggtggctcactcttgctttgctgaggtcatcgtgccagaaaaaaagaacagcggcagtggcggcggcttatctggcatgggccacacacctg

SEQ ID NO: 3863 - DNA, 122 bp, Homo sapiens
  misc_feature (61)..(62): /note="This region represents a CpG dinucleotide"
  misc_feature (61)..(61): /note="Nucleotide may be methylated to form 5-methylcytosine"
cctgccggtaccagtaccagtacttccaccagcactatctcaagcagcaacaatggcaaacgtgcatctgccagtggccagcagccagctgcatcccgttacctgcctcgtgaggtgcctcc

SEQ ID NO: 3864 - DNA, 122 bp, Homo sapiens
  misc_feature (61)..(62): /note="This region represents a CpG dinucleotide"
  misc_feature (61)..(61): /note="Nucleotide may be methylated to form 5-methylcytosine"
gcaagggtttcctggggtccactgtgctccaggccccatgctgggactgcttggcatccccgcttcctgcgtgctccctttctggggctccaagtttggcagagacccaggttgcagaaggg

SEQ ID NO: 3865 - DNA, 122 bp, Homo sapiens
  misc_feature (61)..(62): /note="This region represents a CpG dinucleotide"
  misc_feature (61)..(61): /note="Nucleotide may be methylated to form 5-methylcytosine"
aaggattagcctagaataaacatcaaggcagagctcctaaatgagtgaaacagcctgacacgccatagagggatgatactgagtgacagattgtggcatactagaaaatgcatggcctatct

SEQ ID NO: 3866 - DNA, 122 bp, Homo sapiens
  misc_feature (61)..(62): /note="This region represents a CpG dinucleotide"
  misc_feature (61)..(61): /note="Nucleotide may be methylated to form 5-methylcytosine"
taaaatgctggacaggcttggtatggagcattcacagggtggggctggcacagagtgggacggagcagtgagaggaacaacattgtctggctaattgcatgacttacagtctgaacaacact

SEQ ID NO: 3867 - DNA, 122 bp, Homo sapiens
  misc_feature (61)..(62): /note="This region represents a CpG dinucleotide"
  misc_feature (61)..(61): /note="Nucleotide may be methylated to form 5-methylcytosine"
gaccgagggggatgtggagctggagttagagactgagacccgtggcccagagcggcctcccgagaagccacggaaacatgactgacagcagtgcggcggacttggagcgggtcaccgactat

SEQ ID NO: 3868 - DNA, 122 bp, Homo sapiens
  misc_feature (61)..(62): /note="This region represents a CpG dinucleotide"
  misc_feature (61)..(61): /note="Nucleotide may be methylated to form 5-methylcytosine"
aaatgaagaataaatttacagtgttaaaaaaattaagaagtttctcttacatatcagctacggaagagcttcaggctgcaaaagtggaaataactagggaaatacatcaattttccccatga

SEQ ID NO: 3869 - DNA, 122 bp, Homo sapiens
  misc_feature (61)..(62): /note="This region represents a CpG dinucleotide"
  misc_feature (61)..(61): /note="Nucleotide may be methylated to form 5-methylcytosine"
ccttccgctccccctttcgcctcagagcggccgacaactgcatgtcctggtaagggtctgcgaccctatttccttcctgacccttaacttctcttactctctggctccacatcctcgaaggc

SEQ ID NO: 3870 - DNA, 122 bp, Homo sapiens
  misc_feature (61)..(62): /note="This region represents a CpG dinucleotide"
  misc_feature (61)..(61): /note="Nucleotide may be methylated to form 5-methylcytosine"
accagagaagtttctcttcctccttaggttatccacggtggctggtgagcatggctgtgccgggtgagtgggtgggcagcccaacctgaccccacatctcagcctgggccgagcttcctgac

SEQ ID NO: 3871 - DNA, 122 bp, Homo sapiens
  misc_feature (61)..(62): /note="This region represents a CpG dinucleotide"
  misc_feature (61)..(61): /note="Nucleotide may be methylated to form 5-methylcytosine"
catctggggctctaggtgacacagggctgatgcactccacggaggctgccttgcttaacacgggccccaagggctggttcttgagagcatcttcaaaaggttctgtcatcaacaatattgac

SEQ ID NO: 3872 - DNA, 122 bp, Homo sapiens
  misc_feature (61)..(62): /note="This region represents a CpG dinucleotide"
  misc_feature (61)..(61): /note="Nucleotide may be methylated to form 5-methylcytosine"
agtggagctgtgtaaagcatagctgggaaaagaaagcaaactttaaactaaggaacaagtcggagtttatgtcaaatataaagttagaagggagctctgaagacacacttgtcttcttgtaa

SEQ ID NO: 3873 - DNA, 122 bp, Homo sapiens
  misc_feature (61)..(62): /note="This region represents a CpG dinucleotide"
  misc_feature (61)..(61): /note="Nucleotide may be methylated to form 5-methylcytosine"
tataatcataaactttgctgtgctgctataaatacggaacaaaccagcaagtgactcatccgctaagatggcactcaggcagcctgagctgcgccactctgggtttacagccaaatctaacc

SEQ ID NO: 3874 - DNA, 122 bp, Homo sapiens
  misc_feature (61)..(62): /note="This region represents a CpG dinucleotide"
  misc_feature (61)..(61): /note="Nucleotide may be methylated to form 5-methylcytosine"
tgtattaggttggcgcaaaagttatcgtggttttggtggccaaaaccacgataacttttgcgccaacctaatagcattgaggaaggtgctagcacagctttggtaatataaggaactctaat

SEQ ID NO: 3875 - DNA, 122 bp, Homo sapiens
  misc_feature (61)..(62): /note="This region represents a CpG dinucleotide"
  misc_feature (61)..(61): /note="Nucleotide may be methylated to form 5-methylcytosine"
gctaggactgtgtctaccttgtacgttgtgctggaatcaacttgccatttcctaaacatgcgttgtaatcacacggctctctgtctgcttgctaaagattgagtgtggaataccttttttgt

SEQ ID NO: 3876 - DNA, 122 bp, Homo sapiens
  misc_feature (61)..(62): /note="This region represents a CpG dinucleotide"
  misc_feature (61)..(61): /note="Nucleotide may be methylated to form 5-methylcytosine"
catcacagagcctggtaagaagcagtaggtgacagtgaatggtttttctcaataaatctacgtgcccaagaagggagacatggtcttggcagcatcaccagtcaacatcagagttcgtccaa

SEQ ID NO: 3877 - DNA, 122 bp, Homo sapiens
  misc_feature (61)..(62): /note="This region represents a CpG dinucleotide"
  misc_feature (61)..(61): /note="Nucleotide may be methylated to form 5-methylcytosine"
tagggctggtagagctgtaactgcacagagaagactgcctgcttcttataggttggttgtcgctgtctggaagagtttagcgctgctctgcatcttctgcctcacctgaaatcctacgtgta

SEQ ID NO: 3878 - DNA, 122 bp, Homo sapiens
  misc_feature (61)..(62): /note="This region represents a CpG dinucleotide"
  misc_feature (61)..(61): /note="Nucleotide may be methylated to form 5-methylcytosine"
tgcagtctttgcattctagatgcctttcaagtttacctaggatcccagagcatttcagcccgcagtgttgaggcttgctgagcaactcaagttccatctgctgcgatggatgtttccctgct

SEQ ID NO: 3879 - DNA, 122 bp, Homo sapiens
  misc_feature (61)..(62): /note="This region represents a CpG dinucleotide"
  misc_feature (61)..(61): /note="Nucleotide may be methylated to form 5-methylcytosine"
ctggaaccgaagggagtcagtggagcatctcttaccatttccatgcccagtgttaattgtcgtcgggaaattacagactcagatgaagttccatgccacagcaaatgggatcgggcttttcc

SEQ ID NO: 3880 - DNA, 122 bp, Homo sapiens
  misc_feature (61)..(62): /note="This region represents a CpG dinucleotide"
  misc_feature (61)..(61): /note="Nucleotide may be methylated to form 5-methylcytosine"
catccagttcatagatgagatcagtgtcaacgggtacaaatccagcagggtgactccatgcgtgtgtgtgtatatgtgaataacacaaagcatgtcatgaaatagatgcattaaatctgaag

SEQ ID NO: 3881 - DNA, 122 bp, Homo sapiens
  misc_feature (61)..(62): /note="This region represents a CpG dinucleotide"
  misc_feature (61)..(61): /note="Nucleotide may be methylated to form 5-methylcytosine"
tgggtggatcttttgaacccaggagtttgagaatagccaggcaacatggtgaaaacccatcgctacaaaaaattagccaggcatggtggcgtgcacctgtagtcccagctacttaggaggct

SEQ ID NO: 3882 - DNA, 122 bp, Homo sapiens
  misc_feature (61)..(62): /note="This region represents a CpG dinucleotide"
  misc_feature (61)..(61): /note="Nucleotide may be methylated to form 5-methylcytosine"
cacccccaggaacaatactttgcatcctccaattcaaacaagttgacactaagtgttaaccgtcatagctcaatacataaataaaataacataccttgatggtagaggtatgctcaggagtt

SEQ ID NO: 3883 - DNA, 122 bp, Homo sapiens
  misc_feature (61)..(62): /note="This region represents a CpG dinucleotide"
  misc_feature (61)..(61): /note="Nucleotide may be methylated to form 5-methylcytosine"
ccgtggaatcttttcaatacgagtagtgttagtgtgaacaacctctctttgactctcattcgccttctcatttaatcctaccatttcaagagaatgatctcatctacagactgtaaatactt

SEQ ID NO: 3884 - DNA, 122 bp, Homo sapiens
  misc_feature (61)..(62): /note="This region represents a CpG dinucleotide"
  misc_feature (61)..(61): /note="Nucleotide may be methylated to form 5-methylcytosine"
ttgccagaaaaagttaaagtgcccgttgcttcagcccctgactctgtggtcctaaatacgcggctcctcagtggggcccacagcttaagaccaacgcttcacaggctcacagcccctgtcag

SEQ ID NO: 3885 - DNA, 122 bp, Homo sapiens
  misc_feature (61)..(62): /note="This region represents a CpG dinucleotide"
  misc_feature (61)..(61): /note="Nucleotide may be methylated to form 5-methylcytosine"
tgagagaatctggacactacctgtggctgagccctggagccaccagaatttaatcagatacgtgattaagaaaagtctattttaatgctgaataagatttctatctttcagtttactactta

SEQ ID NO: 3886 - DNA, 122 bp, Homo sapiens
  misc_feature (61)..(62): /note="This region represents a CpG dinucleotide"
  misc_feature (61)..(61): /note="Nucleotide may be methylated to form 5-methylcytosine"
gatgtgcgacaagtcctacacgcatcccagttcgctgcgcaaacacatgaaggtaatcgccgcactctcgtcgccccctttgaggcaggagctctcttggctctcggcttggggtcgggcgg

SEQ ID NO: 3887 - DNA, 122 bp, Homo sapiens
  misc_feature (61)..(62): /note="This region represents a CpG dinucleotide"
  misc_feature (61)..(61): /note="Nucleotide may be methylated to form 5-methylcytosine"
tttgctaagtcaccctatggccaggatctgatgtgttgcacacagcaaacctagatatagcgtgtgcctcctgaaggaatcatttgcttgaagagagaacatgagtcagtgcccaaaaagca

SEQ ID NO: 3888 - DNA, 122 bp, Homo sapiens
  misc_feature (61)..(62): /note="This region represents a CpG dinucleotide"
  misc_feature (61)..(61): /note="Nucleotide may be methylated to form 5-methylcytosine"
ctaggtgttccataaaagttttatgaagctaattcccgttacaaagaaaggtcctgcagacggatgggaatgtaatagtgctttagctaagatgccatattcaaggcagcacatggatatgt

SEQ ID NO: 3889 - DNA, 122 bp, Homo sapiens
  misc_feature (61)..(62): /note="This region represents a CpG dinucleotide"
  misc_feature (61)..(61): /note="Nucleotide may be methylated to form 5-methylcytosine"
atgatgacactttattttaggcatgacaaggaagatttcagataaagattatgccggacgcgaagttcccccatggggccacatgactgtctgctttccagaaaagacattagtgctccttg

SEQ ID NO: 3890 - DNA, 122 bp, Homo sapiens
  misc_feature (61)..(62): /note="This region represents a CpG dinucleotide"
  misc_feature (61)..(61): /note="Nucleotide may be methylated to form 5-methylcytosine"
aggtgtctcaatcaatacaagtcagaatttccaagccactcctgctgatagtgtgcattgcgtgtctctgtgttggcttcttagcgtaggcatctcagataggatctggcagacagggagat

SEQ ID NO: 3891 - DNA, 122 bp, Homo sapiens
  misc_feature (61)..(62): /note="This region represents a CpG dinucleotide"
  misc_feature (61)..(61): /note="Nucleotide may be methylated to form 5-methylcytosine"
tcccaatcagtaggcgcaagagcttttccacttaggatatttaattaatgagaatcgaaccggtaaagaatgaactctatggctggctaaaggttttcctatgggaaattaagacccactaa

SEQ ID NO: 3892 - DNA, 122 bp, Homo sapiens
  misc_feature (61)..(62): /note="This region represents a CpG dinucleotide"
  misc_feature (61)..(61): /note="Nucleotide may be methylated to form 5-methylcytosine"
aggcaggcaaactgagttttgcaaggagtgtgagaagctttccctgggcccctgaaagcacgctgctgttggcatctaaccgatgcatggccatctagttgagctctgcttgcagctgggat

SEQ ID NO: 3893 - DNA, 122 bp, Homo sapiens
  misc_feature (61)..(62): /note="This region represents a CpG dinucleotide"
  misc_feature (61)..(61): /note="Nucleotide may be methylated to form 5-methylcytosine"
aaagaactgggtgatgactcactacccagcagtcagttcctggatggtatgaattacctgcgatacagcttggagggaggacgatctgacaggtatctcataaaacttataattgatgtcag

SEQ ID NO: 3894 - DNA, 122 bp, Homo sapiens
  misc_feature (61)..(62): /note="This region represents a CpG dinucleotide"
  misc_feature (61)..(61): /note="Nucleotide may be methylated to form 5-methylcytosine"
tcctatctataaaattgggatgacatcaccattacgctgcattgcctgtcatgcgtcaggcgctgttctaagtgcttacgtgttctgactcatttactcctcaccaaaactctaggaagtac

SEQ ID NO: 3895 - DNA, 122 bp, Homo sapiens
  misc_feature (61)..(62): /note="This region represents a CpG dinucleotide"
  misc_feature (61)..(61): /note="Nucleotide may be methylated to form 5-methylcytosine"
gggcctttaaggggcctgggacctttctggccatgatcagcattgaggagcttctgggtccgctttagcctgggccatcctgggaaggaacaggtgtgtgtaaaaggaagagtccctgaggc

SEQ ID NO: 3896 - DNA, 122 bp, Homo sapiens
  misc_feature (61)..(62): /note="This region represents a CpG dinucleotide"
  misc_feature (61)..(61): /note="Nucleotide may be methylated to form 5-methylcytosine"
accactgtagcccacatttctgctccatttgaactagccaatcgggattagcttagattgcgcagtccagccccagccaatgggaacaggacacagaagcagcgactaaccgcattagggat

SEQ ID NO: 3897 - DNA, 122 bp, Homo sapiens
  misc_feature (61)..(62): /note="This region represents a CpG dinucleotide"
  misc_feature (61)..(61): /note="Nucleotide may be methylated to form 5-methylcytosine"
tctctccaatctgccagttttcatggaagcccactcctcgctcccgtttccctgggagagcgggagacccttctcgtcagcccagacccttcggggcccctgagcaccctgcccgcccctcc

SEQ ID NO: 3898 - DNA, 122 bp, Homo sapiens
  misc_feature (61)..(62): /note="This region represents a CpG dinucleotide"
  misc_feature (61)..(61): /note="Nucleotide may be methylated to form 5-methylcytosine"
tgatcattcctcaacatgctatttgcatagaccttatcgcctgtcacttcttttttatagcgttctgccactattccaacaggtaaggaaacagcaaatgtgaaggtaggctactgccccat

SEQ ID NO: 3899 - DNA, 122 bp, Homo sapiens
  misc_feature (61)..(62): /note="This region represents a CpG dinucleotide"
  misc_feature (61)..(61): /note="Nucleotide may be methylated to form 5-methylcytosine"
caagtcattaatggttgccactacttaaatgaggctgcacaaatacgccagtttatccaacgtccctaaagtgagataatggcaacacatacaacacaggtgcacaaaaatcacaagttgtt

SEQ ID NO: 3900 - DNA, 122 bp, Homo sapiens
  misc_feature (61)..(62): /note="This region represents a CpG dinucleotide"
  misc_feature (61)..(61): /note="Nucleotide may be methylated to form 5-methylcytosine"
gtttttaaagtaaggttttcttttgaatgtaagcagattttgatggtagaaagaagttgtcgtgtggaattattctgtggagccatttgaatagacttgaaacattgtttatgcataaataa

SEQ ID NO: 3901 - DNA, 122 bp, Homo sapiens
  misc_feature (61)..(62): /note="This region represents a CpG dinucleotide"
  misc_feature (61)..(61): /note="Nucleotide may be methylated to form 5-methylcytosine"
cctgtgatttgatttctcttttgtttccatttatggcagagcctccatcttggcaaggcacgtaatcttatccaagctgtgcaaaacctgtccaaagtgtatgtacaataacataaaaattg

SEQ ID NO: 3902 - DNA, 122 bp, Homo sapiens
  misc_feature (61)..(62): /note="This region represents a CpG dinucleotide"
  misc_feature (61)..(61): /note="Nucleotide may be methylated to form 5-methylcytosine"
gtgtcccagcctgcaccagcagatgtcttgataatagacaaatgctcatgcagaatggaacggtaacatacatgggctggtctaggcagtgcagaatgacaccttaacagttaaacactcgg

SEQ ID NO: 3903 - DNA, 122 bp, Homo sapiens
  misc_feature (61)..(62): /note="This region represents a CpG dinucleotide"
  misc_feature (61)..(61): /note="Nucleotide may be methylated to form 5-methylcytosine"
atccccaaaagagtctaaatgagtcactgcaaacatgaacctccttccactaaggacaaacggaatgaagaaaagccagaaaagacagtatgtgaagagtggacgagaaatagggcaatctc

SEQ ID NO: 3904 - DNA, 122 bp, Homo sapiens
  misc_feature (61)..(62): /note="This region represents a CpG dinucleotide"
  misc_feature (61)..(61): /note="Nucleotide may be methylated to form 5-methylcytosine"
ggattcttctttctgcaggcagaatgcctagtcattgagttgaagcataaactagctcctcgcattttcagtcagaccatcttatagctagtgtatttatataggctctctttctgctttct

SEQ ID NO: 3905 - DNA, 122 bp, Homo sapiens
  misc_feature (61)..(62): /note="This region represents a CpG dinucleotide"
  misc_feature (61)..(61): /note="Nucleotide may be methylated to form 5-methylcytosine"
aatagaaagaacaggcaaagcagttcaatccccattcgtttcagttcttgctgtgcagaccgattaaaaaatgaattaccttcagcgttacaagaccaacgctgaatatcgttaaagtcttt

SEQ ID NO: 3906 - DNA, 122 bp, Homo sapiens
  misc_feature (61)..(62): /note="This region represents a CpG dinucleotide"
  misc_feature (61)..(61): /note="Nucleotide may be methylated to form 5-methylcytosine"
ctgctgctgaggaggccaacttgcggttttccattttcacggtgaaccgcattgtctcagcgttcgctggtattcacaaaatcagaaagaaaggaaggtggtggtgggagggcgcacttttc

SEQ ID NO: 3907 - DNA, 122 bp, Homo sapiens
  misc_feature (61)..(62): /note="This region represents a CpG dinucleotide"
  misc_feature (61)..(61): /note="Nucleotide may be methylated to form 5-methylcytosine"
ataattgatgtccttcttaacacttgcctttgcttagggcagtggctctcattgtaagtacgcacagaatcactcggagggtttgttaaaacaagattgctggctttgctaccaagaatttc

SEQ ID NO: 3908 - DNA, 122 bp, Homo sapiens
  misc_feature (61)..(62): /note="This region represents a CpG dinucleotide"
  misc_feature (61)..(61): /note="Nucleotide may be methylated to form 5-methylcytosine"
tttacttattaaggtgatgaggataactggtttgctcactttatgaatacaaggctgttacgatgaccaaagtcatggaaccagtccaggctaccaggatgagctccaccagagcagggatt

SEQ ID NO: 3909 - DNA, 122 bp, Homo sapiens
  misc_feature (61)..(62): /note="This region represents a CpG dinucleotide"
  misc_feature (61)..(61): /note="Nucleotide may be methylated to form 5-methylcytosine"
tgtatgatggaagtaacttgtttttgattttacaggttcataggtggaagggactaggctcgtcttaaatgtgactttggactttggactttcaagctaatgttggaatgagtaaagacttt

SEQ ID NO: 3910 - DNA, 122 bp, Homo sapiens
  misc_feature (61)..(62): /note="This region represents a CpG dinucleotide"
  misc_feature (61)..(61): /note="Nucleotide may be methylated to form 5-methylcytosine"
cagaccccctctaggagatgttactgtcgctcattcgtatttccggttctactcctcttccgggcacactggagaattacacttccttgctgacttgagataagtcacagctttggccaatg

SEQ ID NO: 3911 - DNA, 122 bp, Homo sapiens
  misc_feature (61)..(62): /note="This region represents a CpG dinucleotide"
  misc_feature (61)..(61): /note="Nucleotide may be methylated to form 5-methylcytosine"
acgtgaagacagacacggggagagcgccatgtgccgacggaggcagaaatgggagtgacgcgtcaatgcgccaaggaacgccaaggattgccacctgtcaccagaagccaggggaggggcac

SEQ ID NO: 3912 - DNA, 122 bp, Homo sapiens
  misc_feature (61)..(62): /note="This region represents a CpG dinucleotide"
  misc_feature (61)..(61): /note="Nucleotide may be methylated to form 5-methylcytosine"
gagaagctggttttagagcctgtgaatcagtcttgagttttctgtgcctgactctcctctcgcgttgctcttccgacgcgcgcacagggtgtgtctgcccagggctgcctcctgcccagcaa

SEQ ID NO: 3913 - DNA, 122 bp, Homo sapiens
  misc_feature (61)..(62): /note="This region represents a CpG dinucleotide"
  misc_feature (61)..(61): /note="Nucleotide may be methylated to form 5-methylcytosine"
acgctatagcggaagtgaaggcgggttccgctaggggcaaaagctgaaaccggaggactccggccctgagcttccggaagggacatctggggaaggtgggggggtggaaacgcgacaggttc

SEQ ID NO: 3914 - DNA, 122 bp, Homo sapiens
  misc_feature (61)..(62): /note="This region represents a CpG dinucleotide"
  misc_feature (61)..(61): /note="Nucleotide may be methylated to form 5-methylcytosine"
aatataaataatgaagacactgacttttgttgtgcttgtgaagctaatagatcatctccacgagacaggcagcaatgatgaattgcaatacgttattactgaagggaaaaggttcaagccaa

SEQ ID NO: 3915 - DNA, 122 bp, Homo sapiens
  misc_feature (61)..(62): /note="This region represents a CpG dinucleotide"
  misc_feature (61)..(61): /note="Nucleotide may be methylated to form 5-methylcytosine"
ttcttctatatttttcaggtgccacaatctcccatccgtatctgccagccctgcagcatgcggcataattcaactgtaattgataatgtaaaggcagatggagaggactgtcagctcctccc

SEQ ID NO: 3916 - DNA, 122 bp, Homo sapiens
  misc_feature (61)..(62): /note="This region represents a CpG dinucleotide"
  misc_feature (61)..(61): /note="Nucleotide may be methylated to form 5-methylcytosine"
gttgaaattgtaatgcatgacctggatttcctctcaataaggcctgtgatcagtgactgccgaaatggggagctgagggatgttgttcttttctttcccattgtcagtgatactgattgcca

SEQ ID NO: 3917 - DNA, 122 bp, Homo sapiens
  misc_feature (61)..(62): /note="This region represents a CpG dinucleotide"
  misc_feature (61)..(61): /note="Nucleotide may be methylated to form 5-methylcytosine"
gaacaagacagagagggtctcactgttgagaaaaatttattatcaatgtctcagagccaacgacgacacgaacctacatgaacacaactcttaatttaggacccaagggtgactgtaaacat

SEQ ID NO: 3918 - DNA, 122 bp, Homo sapiens
  misc_feature (61)..(62): /note="This region represents a CpG dinucleotide"
  misc_feature (61)..(61): /note="Nucleotide may be methylated to form 5-methylcytosine"
agattttatagaatcttcatatctgctttgtaagtgttgaggatcattattgttattgtacgaagtgtctaccacaccctctcattgcactgagagtccgagtaagtttagttagtagatca

SEQ ID NO: 3919 - DNA, 122 bp, Homo sapiens
  misc_feature (61)..(62): /note="This region represents a CpG dinucleotide"
  misc_feature (61)..(61): /note="Nucleotide may be methylated to form 5-methylcytosine"
ttactcacagctgttcgtggcacatgcagacggtcggagaagaggcctccgttccttcctcgcctcctaaccaccggtgccctgacagatccgcctccagctcatgaaagggtcaggtgttg

SEQ ID NO: 3920 - DNA, 122 bp, Homo sapiens
  misc_feature (61)..(62): /note="This region represents a CpG dinucleotide"
  misc_feature (61)..(61): /note="Nucleotide may be methylated to form 5-methylcytosine"
tgagggtcaaagaatttagtaattttttcaagttcatgcaagtcgcacttggcatgcctccggagctggagtttttaaccattaaacattttttcctccctaccatttttttcaactgtaag

SEQ ID NO: 3921 - DNA, 122 bp, Homo sapiens
  misc_feature (61)..(62): /note="This region represents a CpG dinucleotide"
  misc_feature (61)..(61): /note="Nucleotide may be methylated to form 5-methylcytosine"
ctggtgagtgtaccctttctgcagaaagtaaaaatggccttgctgaggaaattaaatgtacgtccaagtgctgcttctttatggcaccagagaacaagcatttctaacacaagggaaaaaaa

SEQ ID NO: 3922 - DNA, 122 bp, Homo sapiens
  misc_feature (61)..(62): /note="This region represents a CpG dinucleotide"
  misc_feature (61)..(61): /note="Nucleotide may be methylated to form 5-methylcytosine"
taacacgaatgacaagtgggtgattttcaagaagcgcccggtccctctagagaatgcgtccgaatatcagcggagccgactgcgtatgcctccggatgcccatctataaactctcttgcttg

SEQ ID NO: 3923 - DNA, 122 bp, Homo sapiens
  misc_feature (61)..(62): /note="This region represents a CpG dinucleotide"
  misc_feature (61)..(61): /note="Nucleotide may be methylated to form 5-methylcytosine"
tgagtgagagagcctggagtcatgttgtctggggccagagtctgcaccagttgcactgtgcgtgcctcctcccacagcctctgtgcagactcagacatgcacagagcatggggaggcagtgg

SEQ ID NO: 3924 - DNA, 122 bp, Homo sapiens
  misc_feature (61)..(62): /note="This region represents a CpG dinucleotide"
  misc_feature (61)..(61): /note="Nucleotide may be methylated to form 5-methylcytosine"
tgggatggggagtcatgggaacctccaaatttatagtctgctgggcagaagttcaggtaacgtacaaatacccaatacctgcagctggcatctgaagtggggcaattttgaggtaatgcgta

SEQ ID NO: 3925 - DNA, 122 bp, Homo sapiens
  misc_feature (61)..(62): /note="This region represents a CpG dinucleotide"
  misc_feature (61)..(61): /note="Nucleotide may be methylated to form 5-methylcytosine"
agctaggctctgttaatcagggatgaggcttcgggtagtcaagttacaagaaggcttcagcgggtgcatgtcagctatgcggttgggcgggttggccccactctaattagcctggcttccca

SEQ ID NO: 3926 - DNA, 122 bp, Homo sapiens
  misc_feature (61)..(62): /note="This region represents a CpG dinucleotide"
  misc_feature (61)..(61): /note="Nucleotide may be methylated to form 5-methylcytosine"
acttgtcatttacattaggtatttctcctaatgctatccctcccccagatccccaccccacgacaggccatgttgtgtgatgttccccgccctgtgtccaaatgttctcattgttcaattcc

SEQ ID NO: 3927 - DNA, 122 bp, Homo sapiens
  misc_feature (61)..(62): /note="This region represents a CpG dinucleotide"
  misc_feature (61)..(61): /note="Nucleotide may be methylated to form 5-methylcytosine"
aggggagcacagaggccaaagcagctcttgtctttacttttcagtcacacagcatgttctcgtggccactggccaaaatggcttttttttttttttttgagatggagtctcactcttgttgc

SEQ ID NO: 3928 - DNA, 122 bp, Homo sapiens
  misc_feature (61)..(62): /note="This region represents a CpG dinucleotide"
  misc_feature (61)..(61): /note="Nucleotide may be methylated to form 5-methylcytosine"
gtggaagaaaattcttcatttcagtgactgctgtcaagccactgtttctaggacctcccccggatggatgaagataaagaccaataaaaagggctggttggtttgcttttgctacatcaagg

SEQ ID NO: 3929 - DNA, 122 bp, Homo sapiens
  misc_feature (61)..(62): /note="This region represents a CpG dinucleotide"
  misc_feature (61)..(61): /note="Nucleotide may be methylated to form 5-methylcytosine"
tctggcctctcttgtttgactgtaggtcacaagaccctggtttcagaagaggtcctgccccgtaccttgcgggaaggagtgctgcacggaggccacgagggatctgaacacacaggccttgc

SEQ ID NO: 3930 - DNA, 122 bp, Homo sapiens
  misc_feature (61)..(62): /note="This region represents a CpG dinucleotide"
  misc_feature (61)..(61): /note="Nucleotide may be methylated to form 5-methylcytosine"
cagcctgggcgacagaaggagactccgtctcaaaaaaaaaaaaaaaaaaaaagtgcattacggtcagctggtagccagctcatgttttcattttgcaaggatctaagtttagaattggcttc

SEQ ID NO: 3931 - DNA, 122 bp, Homo sapiens
  misc_feature (61)..(62): /note="This region represents a CpG dinucleotide"
  misc_feature (61)..(61): /note="Nucleotide may be methylated to form 5-methylcytosine"
ccattcatcagttcatgggcatttgcggtttttttccacctttcgactgttgtgactttccgtttatttttaatctgaactttactccatcacttcctccctttccttttttattcgcacca

SEQ ID NO: 3932 - DNA, 122 bp, Homo sapiens
  misc_feature (61)..(62): /note="This region represents a CpG dinucleotide"
  misc_feature (61)..(61): /note="Nucleotide may be methylated to form 5-methylcytosine"
tgcatttaaaatacaactggtcggtggggagggattacagcacaagccgaagcttgtctgcgggagttggccatgaactaatagtccacatacggcagcctgccacatcttcccacccaacc

SEQ ID NO: 3933 - DNA, 122 bp, Homo sapiens
  misc_feature (61)..(62): /note="This region represents a CpG dinucleotide"
  misc_feature (61)..(61): /note="Nucleotide may be methylated to form 5-methylcytosine"
attttaaaatgtaatttaaccaagactactttagctttcacctcagcttactttagacagcgcagactgcctctaggctcctgaaccagaacatttacttagagcatttactttagaaacct

SEQ ID NO: 3934 - DNA, 122 bp, Homo sapiens
  misc_feature (61)..(62): /note="This region represents a CpG dinucleotide"
  misc_feature (61)..(61): /note="Nucleotide may be methylated to form 5-methylcytosine"
tatcctacgtgaattaaaagagaaacagaaaaccaaataccacatgctctcacttgtagacgggagctaaacaatgggtacaggtggacataaagacagaaataatagatactagggactcc

SEQ ID NO: 3935 - DNA, 122 bp, Homo sapiens
  misc_feature (61)..(62): /note="This region represents a CpG dinucleotide"
  misc_feature (61)..(61): /note="Nucleotide may be methylated to form 5-methylcytosine"
gatgaacagcctccgctgaagtcccagccctaccaggtgctggaagagtgacaacggcctcgtcggccaactttctatctcctccactgcaaacgcctgccctcacagggctcttgtgaaaa

SEQ ID NO: 3936 - DNA, 122 bp, Homo sapiens
  misc_feature (61)..(62): /note="This region represents a CpG dinucleotide"
  misc_feature (61)..(61): /note="Nucleotide may be methylated to form 5-methylcytosine"
tgaaaatatgagttagtagtgaggaatgttctgactcgactaggcattctctagcatcaccgcagcttagacagggaggggcagcttgttactgtcaggtgaggataaagccagattatctc

SEQ ID NO: 3937 - DNA, 122 bp, Homo sapiens
  misc_feature (61)..(62): /note="This region represents a CpG dinucleotide"
  misc_feature (61)..(61): /note="Nucleotide may be methylated to form 5-methylcytosine"
tgtcagccaggctgcagtcatctcaaggctgactggagaaagatttgcttccaagccactcgtacggttgttggcaggattcacttccttgctggctgctggccacaggcctccctcattcc

SEQ ID NO: 3938 - DNA, 122 bp, Homo sapiens
  misc_feature (61)..(62): /note="This region represents a CpG dinucleotide"
  misc_feature (61)..(61): /note="Nucleotide may be methylated to form 5-methylcytosine"
agtagtttgctgacccctgtcctgcagataatctccccaatcccatggatttaaatgtcacgtgtgtgctgacacacaggtttgggctggaaatacagtcctgatatctcccataattccag

SEQ ID NO: 3939 - DNA, 122 bp, Homo sapiens
  misc_feature (61)..(62): /note="This region represents a CpG dinucleotide"
  misc_feature (61)..(61): /note="Nucleotide may be methylated to form 5-methylcytosine"
aaagttgattgcctcaggaagctgcagagtcaacaatttcatttatcccttttcaatgttcgctgagttttgatgtgaacctttactaatccataaagaatgggaagtctacacgtttctgg

SEQ ID NO: 3940 - DNA, 122 bp, Homo sapiens
  misc_feature (61)..(62): /note="This region represents a CpG dinucleotide"
  misc_feature (61)..(61): /note="Nucleotide may be methylated to form 5-methylcytosine"
tgttaaaagaaaatgagagtttattgattgttttaagccaggcatgttctagcagcgagccgctattcagattcagcaagcggcaatagataactgatttcaataagaagacagagaggaat

SEQ ID NO: 3941 - DNA, 122 bp, Homo sapiens
  misc_feature (61)..(62): /note="This region represents a CpG dinucleotide"
  misc_feature (61)..(61): /note="Nucleotide may be methylated to form 5-methylcytosine"
cttgaaatgcttgtgctctttcctgatctggacttggactgagatgcacctacctttgcacgttacactcagagcacaagtgattctgctggggaggtcaagagggaaccaggaagttatga

SEQ ID NO: 3942 - DNA, 122 bp, Homo sapiens
  misc_feature (61)..(62): /note="This region represents a CpG dinucleotide"
  misc_feature (61)..(61): /note="Nucleotide may be methylated to form 5-methylcytosine"
tcaccttcagttctgtgaacccctggctggccgcttccagccacgctagccaccctccagcgtccaaatgaggcagccacagctcccctgccaaggtcttggtctccagtccaccccaaccg

SEQ ID NO: 3943 - DNA, 122 bp, Homo sapiens
  misc_feature (61)..(62): /note="This region represents a CpG dinucleotide"
  misc_feature (61)..(61): /note="Nucleotide may be methylated to form 5-methylcytosine"
tacaaaagaaaaacaaagtaagcagttggacaggggatgatatcaattatgttagcatgtcgatatatgttaaaccatgaaactatgtgagctcaacaaggaagtaagggaagagagtagag

SEQ ID NO: 3944 - DNA, 122 bp, Homo sapiens
  misc_feature (61)..(62): /note="This region represents a CpG dinucleotide"
  misc_feature (61)..(61): /note="Nucleotide may be methylated to form 5-methylcytosine"
aatgaagagtctctctttcttactttgcacatacagacctgagcagttaagattccataacgagatccacggccaacagttaagcagaaacaatgacaggcctgttcagaaggccagagtgt

SEQ ID NO: 3945 - DNA, 122 bp, Homo sapiens
  misc_feature (61)..(62): /note="This region represents a CpG dinucleotide"
  misc_feature (61)..(61): /note="Nucleotide may be methylated to form 5-methylcytosine"
ggtaaggctttttcttttaataaaagcaacccccaaaccatttcttttctaacagaaaaacgacttgaagggccaagctggcaagctttgatatgcaaatgcaggccattagaaacagtcca

SEQ ID NO: 3946 - DNA, 122 bp, Homo sapiens
  misc_feature (61)..(62): /note="This region represents a CpG dinucleotide"
  misc_feature (61)..(61): /note="Nucleotide may be methylated to form 5-methylcytosine"
tgaatcctccaactttgtttttctttttcaaaattgtcttggcaattctagttcctttgccgttccatataaattttagaatcagtttgttattttttataaaaagattgctggggatttga

SEQ ID NO: 3947 - DNA, 122 bp, Homo sapiens
  misc_feature (61)..(62): /note="This region represents a CpG dinucleotide"
  misc_feature (61)..(61): /note="Nucleotide may be methylated to form 5-methylcytosine"
cttagacaaacactagaaacaattccacaggatttacagtcttagaatttcagggaggagcgcctggatgaaaattctgagataggcgtaagatcactgtacctcgtgtcttctataacttc

SEQ ID NO: 3948 - DNA, 122 bp, Homo sapiens
  misc_feature (61)..(62): /note="This region represents a CpG dinucleotide"
  misc_feature (61)..(61): /note="Nucleotide may be methylated to form 5-methylcytosine"
aattgtcaactccttctctttcctgcctcctcccctcttttgacatggcctctttggtggcgttgtagtgactaacaaacagtatagattttggagcagccagacagacctgaatttaattc

SEQ ID NO: 3949 - DNA, 122 bp, Homo sapiens
  misc_feature (61)..(62): /note="This region represents a CpG dinucleotide"
  misc_feature (61)..(61): /note="Nucleotide may be methylated to form 5-methylcytosine"
tattccatataaaagcttcatggtgcagaattactatccccattttatagatagaagaaacggaggctcaggttcaaagtcacccagtgaataaactcagacaaatagcctcacgatctcat

SEQ ID NO: 3950 - DNA, 122 bp, Homo sapiens
  misc_feature (61)..(62): /note="This region represents a CpG dinucleotide"
  misc_feature (61)..(61): /note="Nucleotide may be methylated to form 5-methylcytosine"
actgttgttttgactcactttgtgacgtaggtctttctcaccagtcaagaaaatataatccggagatagcctctgggctggctttagctcagcggttacttcgagtacattgtaaccacctc

SEQ ID NO: 3951 - DNA, 122 bp, Homo sapiens
  misc_feature (61)..(62): /note="This region represents a CpG dinucleotide"
  misc_feature (61)..(61): /note="Nucleotide may be methylated to form 5-methylcytosine"
gatctgtgactccccggtgcccctgccagaattgatctcgaaatggtggattacaacagccgtggtacatccacaagctgcctgggagtttcttgtcttctcatcacagtcaaaatggctta

SEQ ID NO: 3952 - DNA, 122 bp, Homo sapiens
  misc_feature (61)..(62): /note="This region represents a CpG dinucleotide"
  misc_feature (61)..(61): /note="Nucleotide may be methylated to form 5-methylcytosine"
ccgtgatcgacgtgaatgtattttctgtctctctctgactttgtccctgctgcctgtttccgtctgtctctttctctgaatccttgactgtctctctggttctctgtgagtcttgccatcgc

SEQ ID NO: 3953 - DNA, 122 bp, Homo sapiens
  misc_feature (61)..(62): /note="This region represents a CpG dinucleotide"
  misc_feature (61)..(61): /note="Nucleotide may be methylated to form 5-methylcytosine"
ttccaactctggaaacaattccactagaaggctcaatagttcaggtaagaccactcatttcgtgactcatgaatccgtgattatacatctttacggaaaaaagttctttttttctagctttc

SEQ ID NO: 3954 - DNA, 122 bp, Homo sapiens
  misc_feature (61)..(62): /note="This region represents a CpG dinucleotide"
  misc_feature (61)..(61): /note="Nucleotide may be methylated to form 5-methylcytosine"
agcaaactactttagcattaactaaatccattgtatttgttcagtcttccgtgtcagtctcgtcaatcccagtgactcatgttatcttttctcacctcttgtggtgttccctttgaaggtag

SEQ ID NO: 3955 - DNA, 122 bp, Homo sapiens
  misc_feature (61)..(62): /note="This region represents a CpG dinucleotide"
  misc_feature (61)..(61): /note="Nucleotide may be methylated to form 5-methylcytosine"
attttacagccccgcatggagtgactccaagccaatcgtatctgtttccaagtgatctgacgcagcaagcagattgtatttcctttggaggcttggctgagaattgttgggttggcaacact

SEQ ID NO: 3956 - DNA, 122 bp, Homo sapiens
  misc_feature (61)..(62): /note="This region represents a CpG dinucleotide"
  misc_feature (61)..(61): /note="Nucleotide may be methylated to form 5-methylcytosine"
caagactccatctcaaaacagcaacaaaaccattcagtctaagaacatagcatttattaccgtttattcaaatagcttacatctgccagtgaagttttgttattttccatataaattctctg

SEQ ID NO: 3957 - DNA, 122 bp, Homo sapiens
  misc_feature (61)..(62): /note="This region represents a CpG dinucleotide"
  misc_feature (61)..(61): /note="Nucleotide may be methylated to form 5-methylcytosine"
cttgctaaacattgggagcatgcggccacaagaggccacctctacaattaaacagccaagcgcagcagcagaagcaagggcatgtcatgagagaactgtctagtattaattttaaaagtcca

SEQ ID NO: 3958 - DNA, 122 bp, Homo sapiens
  misc_feature (61)..(62): /note="This region represents a CpG dinucleotide"
  misc_feature (61)..(61): /note="Nucleotide may be methylated to form 5-methylcytosine"
gtaaaggctggctttcatcaccaccagcgggctaacctcctacatatatctgtgtgtctacggcaaggtcgacagaacccatatataaggaaatactgatactgaaaaacttgaaaaacctg

SEQ ID NO: 3959 - DNA, 122 bp, Homo sapiens
  misc_feature (61)..(62): /note="This region represents a CpG dinucleotide"
  misc_feature (61)..(61): /note="Nucleotide may be methylated to form 5-methylcytosine"
aaagaatgccttgtttctgtcccctgaagacgcaagctgaaaaaatgtctggctgctcttcgccgccctcccaggttctctcccacagccaagaacgactggctgctgccctgagccgggag

SEQ ID NO: 3960 - DNA, 122 bp, Homo sapiens
  misc_feature (61)..(62): /note="This region represents a CpG dinucleotide"
  misc_feature (61)..(61): /note="Nucleotide may be methylated to form 5-methylcytosine"
tctacccctcccttctgccttgaagtgcctgagtcttatccataccagatatgccactatcgagaagcagatgacaggctcaggccttaccagggatgcacttgccacattttggaaagact

SEQ ID NO: 3961 - DNA, 122 bp, Homo sapiens
  misc_feature (61)..(62): /note="This region represents a CpG dinucleotide"
  misc_feature (61)..(61): /note="Nucleotide may be methylated to form 5-methylcytosine"
cattccccagcaagggagaaataattcagattacatcctcctgctgttggatcagggcagcgcatttcaatttaagcccatacagccagagacaggttcatgtagaatggaataaattaata

SEQ ID NO: 3962 - DNA, 122 bp, Homo sapiens
  misc_feature (61)..(62): /note="This region represents a CpG dinucleotide"
  misc_feature (61)..(61): /note="Nucleotide may be methylated to form 5-methylcytosine"
tgtggcatttattgccctctactaaaatgagctattatctgacactctgctctgtacagacgtgtttctgtttccattttcagttccttctccacatggtctaagtaccagtagtttagtca

SEQ ID NO: 3963 - DNA, 122 bp, Homo sapiens
  misc_feature (61)..(62): /note="This region represents a CpG dinucleotide"
  misc_feature (61)..(61): /note="Nucleotide may be methylated to form 5-methylcytosine"
ttttgaaaatgcggttttatgagtattgccagctattcagtctctccttaataccatcaacgcatctgtgagatgataaaaacagatgccctcttggaaggcattatggaaaactcacggac

SEQ ID NO: 3964 - DNA, 122 bp, Homo sapiens
  misc_feature (61)..(62): /note="This region represents a CpG dinucleotide"
  misc_feature (61)..(61): /note="Nucleotide may be methylated to form 5-methylcytosine"
aataaaaaagataagtgttgatgaggatgtggggaaactggaaccttaataagccgcaggcgagaatgtaaaatggtgacgccatgttggaaaacaatctggcagttcctcaaaatgctaaa

SEQ ID NO: 3965 - DNA, 122 bp, Homo sapiens
  misc_feature (61)..(62): /note="This region represents a CpG dinucleotide"
  misc_feature (61)..(61): /note="Nucleotide may be methylated to form 5-methylcytosine"
caggactgggatcatgcttgtccccattctgttcctaatggaggctatccatgtagtagtcgctggcaaataactcttagtgacttaagttcaggaggcagaagcatggtgaagggggcaga

SEQ ID NO: 3966 - DNA, 122 bp, Homo sapiens
  misc_feature (61)..(62): /note="This region represents a CpG dinucleotide"
  misc_feature (61)..(61): /note="Nucleotide may be methylated to form 5-methylcytosine"
acttgtggcacgcctaggacagtgcttggcattactcagtaagtgctcagtaaaccactgcgtgtgtgacatgtaagctgcacttgcttgaaaagggaccaaatgctcctggtgtcaacagg

SEQ ID NO: 3967 - DNA, 122 bp, Homo sapiens
  misc_feature (61)..(62): /note="This region represents a CpG dinucleotide"
  misc_feature (61)..(61): /note="Nucleotide may be methylated to form 5-methylcytosine"
gcctcagcaagaaaagagcaggtctgtgagagcatctaaggcaagaagtggccctggcttcgaagtggaatgttaaattaaaccatttgctgactgataacttgggcaggtggcttcatctc

SEQ ID NO: 3968 - DNA, 122 bp, Homo sapiens
  misc_feature (61)..(62): /note="This region represents a CpG dinucleotide"
  misc_feature (61)..(61): /note="Nucleotide may be methylated to form 5-methylcytosine"
gttgtgataattctcatttcacagatgagagaactggtgcttagggacacttacagggtgcgttcaaggtcataaaactgctaagagagatggagcagaaactggaacctggtctgtttgat

SEQ ID NO: 3969 - DNA, 122 bp, Homo sapiens
  misc_feature (61)..(62): /note="This region represents a CpG dinucleotide"
  misc_feature (61)..(61): /note="Nucleotide may be methylated to form 5-methylcytosine"
acagtcaggttcctatgattcaaaatcaaatccttgcccaacctctacactgcattcactcgtctaaaagccttgaagttgcattacagaaaatctcatcggattatctactattagttttg

SEQ ID NO: 3970 - DNA, 122 bp, Homo sapiens
  misc_feature (61)..(62): /note="This region represents a CpG dinucleotide"
  misc_feature (61)..(61): /note="Nucleotide may be methylated to form 5-methylcytosine"
gacctggggcttgggtctagatgaagagcacagcatcaggaggccaggcttctaatgcggcgcagtctacagcgctgtggactcggcaactcccatcacctgccgctgcacaaacaccctgc

SEQ ID NO: 3971 - DNA, 122 bp, Homo sapiens
  misc_feature (61)..(62): /note="This region represents a CpG dinucleotide"
  misc_feature (61)..(61): /note="Nucleotide may be methylated to form 5-methylcytosine"
gtgtgctcactacacaggcctgaggtgccatgtgaccttatctttgagcggtcagaagcacgtcagaaaggcttccaccatggctggtgaataagagcgctataaaacctgagaacacaaga

SEQ ID NO: 3972 - DNA, 122 bp, Homo sapiens
  misc_feature (61)..(62): /note="This region represents a CpG dinucleotide"
  misc_feature (61)..(61): /note="Nucleotide may be methylated to form 5-methylcytosine"
ctgcacgctcaatctgccttcttattattgttaagccagcctgcctcccagtatgttctgcgtcccatctgacttccgcagagttcgagggagcttaggacaaacagaacaggggagcagct

SEQ ID NO: 3973 - DNA, 122 bp, Homo sapiens
  misc_feature (61)..(62): /note="This region represents a CpG dinucleotide"
  misc_feature (61)..(61): /note="Nucleotide may be methylated to form 5-methylcytosine"
cgctgcgtccagagagatggggccgagcctccctgcggagcagaaccgtgggacggagggcggtgggctccgcagggagggggcgcagtccgggacagaccccagcacaggctccttccacc

SEQ ID NO: 3974 - DNA, 122 bp, Homo sapiens
  misc_feature (61)..(62): /note="This region represents a CpG dinucleotide"
  misc_feature (61)..(61): /note="Nucleotide may be methylated to form 5-methylcytosine"
aggattcccttggctcaggatctcctggctcttggagacttgcaaaagtcctgatgttggcgtcgatgtctgtaagacaggttgggctggctgctcctggctggcaggctgagtggtataat

SEQ ID NO: 3975 - DNA, 122 bp, Homo sapiens
  misc_feature (61)..(62): /note="This region represents a CpG dinucleotide"
  misc_feature (61)..(61): /note="Nucleotide may be methylated to form 5-methylcytosine"
gttaataagcctctaatttctctctcttaactagtggtgttgactaaaccaccagaacaacgttaaatgatgatggtaatagtatatgtgattatcttattcttgaattcaacaggaataca

SEQ ID NO: 3976 - DNA, 122 bp, Homo sapiens
  misc_feature (61)..(62): /note="This region represents a CpG dinucleotide"
  misc_feature (61)..(61): /note="Nucleotide may be methylated to form 5-methylcytosine"
actgatagaacagactctttaagtctgataagaaacattcctttctattgattctatctacgtaataggaactttgtctccacaaccccttatctgaacccagacattctttctattgattc

SEQ ID NO: 3977 - DNA, 122 bp, Homo sapiens
  misc_feature (61)..(62): /note="This region represents a CpG dinucleotide"
  misc_feature (61)..(61): /note="Nucleotide may be methylated to form 5-methylcytosine"
cagcaggcgtgataccctgtagcgaggaccttctaaatggactcacagggagaaatggggcggttcaaaggtaaagacaatagtttcaagcctacaccaaggcgagctggcacagggattgc

SEQ ID NO: 3978 - DNA, 122 bp, Homo sapiens
  misc_feature (61)..(62): /note="This region represents a CpG dinucleotide"
  misc_feature (61)..(61): /note="Nucleotide may be methylated to form 5-methylcytosine"
agaatgcctccaccaactactgaaatctagtagtacttgaggaccaagccacagagcaagcgctaaaaaaaaagttaactagaaccttaccactttttcacgcaccccaatttcataaaatg

SEQ ID NO: 3979 - DNA, 122 bp, Homo sapiens
  misc_feature (61)..(62): /note="This region represents a CpG dinucleotide"
  misc_feature (61)..(61): /note="Nucleotide may be methylated to form 5-methylcytosine"
gaaccgggaagggggggcagggcgagcggagagctagctgtgttcctgaggcggcggcggcggcggcggcggcggcggcgtctccgacggaggaggagggcggggaaggaggatggagcaag

SEQ ID NO: 3980 - DNA, 122 bp, Homo sapiens
  misc_feature (61)..(62): /note="This region represents a CpG dinucleotide"
  misc_feature (61)..(61): /note="Nucleotide may be methylated to form 5-methylcytosine"
aagttaactagactagatatcagtccaaatctcctcaaatagtggataattccaaaaccacgttctcgggaaggcatatttttctatttgttacctttcaaacagggaaggaaaattagaag

SEQ ID NO: 3981 - DNA, 122 bp, Homo sapiens
  misc_feature (61)..(62): /note="This region represents a CpG dinucleotide"
  misc_feature (61)..(61): /note="Nucleotide may be methylated to form 5-methylcytosine"
gagggtgtacacagacacagctcacacaagcacacacccacaggtgtcacactcatggcacgaatagacacacgctcacaaacacacagacccacgagggcagggcagctgactctgcatac

SEQ ID NO: 3982 - DNA, 122 bp, Homo sapiens
  misc_feature (61)..(62): /note="This region represents a CpG dinucleotide"
  misc_feature (61)..(61): /note="Nucleotide may be methylated to form 5-methylcytosine"
accagccaactttaatggaggacctagcaagtgccaggcagcattctgagccctggaatccggtgatgaacatgacagacaagattcctgcccccaaggagctgcaccttaataagtcccgc

SEQ ID NO: 3983 - DNA, 122 bp, Homo sapiens
  misc_feature (61)..(62): /note="This region represents a CpG dinucleotide"
  misc_feature (61)..(61): /note="Nucleotide may be methylated to form 5-methylcytosine"
gcaaataagctgagtggcttcagacaagccactttacttatctctgggcctcagttttcccgtttatggattaaagacattcacagacattggctgagtgcccgcaatgtgccagctattga

SEQ ID NO: 3984 - DNA, 122 bp, Homo sapiens
  misc_feature (61)..(62): /note="This region represents a CpG dinucleotide"
  misc_feature (61)..(61): /note="Nucleotide may be methylated to form 5-methylcytosine"
ctatttcttaattcggtcaagttgatacctaaaactaaccatcacattaaacaagttatgcgcttctaaaaaaaaatggtgtgacagaaataagatagacattgccattccaaaatggagaa

SEQ ID NO: 3985 - DNA, 122 bp, Homo sapiens
  misc_feature (61)..(62): /note="This region represents a CpG dinucleotide"
  misc_feature (61)..(61): /note="Nucleotide may be methylated to form 5-methylcytosine"
tgtggctttacctcacacagcaggaggcatttaagttatataacatctctatttcatacccgcagagttgtataacattctccagggagccatgcctcgtaaatccggtgattgtaatttta

SEQ ID NO: 3986 - DNA, 122 bp, Homo sapiens
  misc_feature (61)..(62): /note="This region represents a CpG dinucleotide"
  misc_feature (61)..(61): /note="Nucleotide may be methylated to form 5-methylcytosine"
tcattgtccagtctcactctggttaactgggcaatacctggttctaaagcttgtatgtcacgaggtattctaggaagcatgactccaacgagcacttgcattcttgatgatggtataaagaa

SEQ ID NO: 3987 - DNA, 122 bp, Homo sapiens
  misc_feature (61)..(62): /note="This region represents a CpG dinucleotide"
  misc_feature (61)..(61): /note="Nucleotide may be methylated to form 5-methylcytosine"
cacacaactacatggatgaatcacaaaataatcatgggctggaagaagccaaaaagcgcacgattccatttaagccaaatcctaggaaacagtgtgaactgagtaatagggatagagagtgg

SEQ ID NO: 3988 - DNA, 122 bp, Homo sapiens
  misc_feature (61)..(62): /note="This region represents a CpG dinucleotide"
  misc_feature (61)..(61): /note="Nucleotide may be methylated to form 5-methylcytosine"
gactatgaggaatgttaacttgaattagaaccaactcggaagtataatatcaactataaacgcttttctattaccccatccctttagctttttctgtcctctttcttttaaccaagggacat

SEQ ID NO: 3989 - DNA, 122 bp, Homo sapiens
  misc_feature (61)..(62): /note="This region represents a CpG dinucleotide"
  misc_feature (61)..(61): /note="Nucleotide may be methylated to form 5-methylcytosine"
gttgtaagattaaaacagtcatcccagaaatgccgttctctgttgatggttcttactggccgtggttaaattctgggcctcagcacagtgacctcaagtattttttctttaagggatgtgct

SEQ ID NO: 3990 - DNA, 122 bp, Homo sapiens
  misc_feature (61)..(62): /note="This region represents a CpG dinucleotide"
  misc_feature (61)..(61): /note="Nucleotide may be methylated to form 5-methylcytosine"
ggaaaccatttaaacagccatattctgtcatattagtagtaaagtttcccatgccaaaggcgatggccacacacagcatgtcatgactcaagagttgagcaccaggtttgggcgaggtggcc

SEQ ID NO: 3991 - DNA, 122 bp, Homo sapiens
  misc_feature (61)..(62): /note="This region represents a CpG dinucleotide"
  misc_feature (61)..(61): /note="Nucleotide may be methylated to form 5-methylcytosine"
ggcagtggaacatgcaaggcactgactgagcatgcaggatcagctccatctcattatgtacgtagatagaggtggagacaggaaaaagactaagccagacgtggtggctcacacctgtaatc

SEQ ID NO: 3992 - DNA, 122 bp, Homo sapiens
  misc_feature (61)..(62): /note="This region represents a CpG dinucleotide"
  misc_feature (61)..(61): /note="Nucleotide may be methylated to form 5-methylcytosine"
tgctgatttgggaggtcagaatcttgttctgggctttattagcatttcgctcaagtcaagcgaatcaccttgtcaagtcatatgcagagaaggcagaacatgacgttggaggaaagaaaaca

SEQ ID NO: 3993 - DNA, 122 bp, Homo sapiens
  misc_feature (61)..(62): /note="This region represents a CpG dinucleotide"
  misc_feature (61)..(61): /note="Nucleotide may be methylated to form 5-methylcytosine"
ttatggaagtaccaccattcaaatatctatgacaaacagaaaatatcctgcacttagaatcgatcagcagatacatgagctcaaattaaaacattctctcaagatgtcctgttcaattcagc

SEQ ID NO: 3994 - DNA, 122 bp, Homo sapiens
  misc_feature (61)..(62): /note="This region represents a CpG dinucleotide"
  misc_feature (61)..(61): /note="Nucleotide may be methylated to form 5-methylcytosine"
aaggtcagttgtgatgtacattgcctgttggcactgtctagggaatgggcctcagctccccgagtcccagagagcttggctgagccctggtgttcccacctcctcagagccatgaggcagga

SEQ ID NO: 3995 - DNA, 122 bp, Homo sapiens
  misc_feature (61)..(62): /note="This region represents a CpG dinucleotide"
  misc_feature (61)..(61): /note="Nucleotide may be methylated to form 5-methylcytosine"
tttaatttttgcccttaccacaaaccgacggagatatgcatcagacttatcagatgagtgcgtccaatagaactgaaacgttcagtctgtctaatttagcaaattctaaatagctaccttca

SEQ ID NO: 3996 - DNA, 122 bp, Homo sapiens
  misc_feature (61)..(62): /note="This region represents a CpG dinucleotide"
  misc_feature (61)..(61): /note="Nucleotide may be methylated to form 5-methylcytosine"
tctcaagcgatcctcccaccttggcttcccatagggctgggattacaggcattagcctcccggcccagtgttttgttttgaagtgtgctttgtctgatattaacatagccactccagcttaa

SEQ ID NO: 3997 - DNA, 122 bp, Homo sapiens
  misc_feature (61)..(62): /note="This region represents a CpG dinucleotide"
  misc_feature (61)..(61): /note="Nucleotide may be methylated to form 5-methylcytosine"
tctaggtttcagagctgccctctctaatccttttgttatatgatacaggcaatgagcactcggtaggaaattggtactgagaaacccaatactctatgtaggaaaatcagaacaataaattt

SEQ ID NO: 3998 - DNA, 122 bp, Homo sapiens
  misc_feature (61)..(62): /note="This region represents a CpG dinucleotide"
  misc_feature (61)..(61): /note="Nucleotide may be methylated to form 5-methylcytosine"
atcaaaagaaagacaaacgctcatgtaaaaatccacacctagaggctctcaggcacagagcgatcacaggagaggcagagtgtgcaaacaagctttcattaagagacctgtcagctctgttt

SEQ ID NO: 3999 - DNA, 122 bp, Homo sapiens
  misc_feature (61)..(62): /note="This region represents a CpG dinucleotide"
  misc_feature (61)..(61): /note="Nucleotide may be methylated to form 5-methylcytosine"
gacccagtggctgtccttggaagccaggttggtctccacggcctgcagagagaaaaagaacgaacatgaacagaagcaagacagaagctggcagacacaggatgattgccgagacagagttt

SEQ ID NO: 4000 - DNA, 122 bp, Homo sapiens
  misc_feature (61)..(62): /note="This region represents a CpG dinucleotide"
  misc_feature (61)..(61): /note="Nucleotide may be methylated to form 5-methylcytosine"
ttctgattcagtaggactggaacagggcttctgagcctgcatttctaaccagctggtccgcggactacaccaagagttgcacaactgcaggcactaatgactctttattgattatttaaccc

SEQ ID NO: 4001 - DNA, 122 bp, Homo sapiens
  misc_feature (61)..(62): /note="This region represents a CpG dinucleotide"
  misc_feature (61)..(61): /note="Nucleotide may be methylated to form 5-methylcytosine"
ttgaatatggtaattcctgttctgccttcatggtcccgggggatgggttttcttttcgagcgtggagatgaaaagttgtccctggttagtgtgccctttgtttaggaacagggtgaatcttg

SEQ ID NO: 4002 - DNA, 122 bp, Homo sapiens
  misc_feature (61)..(62): /note="This region represents a CpG dinucleotide"
  misc_feature (61)..(61): /note="Nucleotide may be methylated to form 5-methylcytosine"
ctcacaggcagggattctgttctccagcattactttttaaaaggtgttcagctagaaaatcgcatattatttcttctgtaaaggtttctccttgccacctttccgtagctacagctgtcaca

SEQ ID NO: 4003 - DNA, 122 bp, Homo sapiens
  misc_feature (61)..(62): /note="This region represents a CpG dinucleotide"
  misc_feature (61)..(61): /note="Nucleotide may be methylated to form 5-methylcytosine"
tcgggtttcctcatctgtgaaacgggaacggatgtggcttcttaaccattacgctgtgtccgtcacagtcattctcacttctcgagtacccagttggtgggagttccagtatggcacagaga

SEQ ID NO: 4004 - DNA, 122 bp, Homo sapiens
  misc_feature (61)..(62): /note="This region represents a CpG dinucleotide"
  misc_feature (61)..(61): /note="Nucleotide may be methylated to form 5-methylcytosine"
ctaatttgttttttacattcctgacttatgtttggctgctaagaaatgatagcttaaatgcgtctaagataagagcagggattttgtgaataatgaatatagagtttgccagagttgagagc

SEQ ID NO: 4005 - DNA, 122 bp, Homo sapiens
  misc_feature (61)..(62): /note="This region represents a CpG dinucleotide"
  misc_feature (61)..(61): /note="Nucleotide may be methylated to form 5-methylcytosine"
atgtgcctgttagagttggctctgtcttctcctgccaaggcattcacagcttcttttgcacgtacgggattacagtgggaaacccattccacccagtggatggcctggtcttgaggcttacc

SEQ ID NO: 4006 - DNA, 122 bp, Homo sapiens
  misc_feature (61)..(62): /note="This region represents a CpG dinucleotide"
  misc_feature (61)..(61): /note="Nucleotide may be methylated to form 5-methylcytosine"
ctgtctttcaaaatgacaggcacaagacctgtccctttcactcctgctggtactcagtgacgtacagtcatgcatctttcaacatcaagaatatgttctgagaaatgtgtcatttggtgatt

SEQ ID NO: 4007 - DNA, 122 bp, Homo sapiens
  misc_feature (61)..(62): /note="This region represents a CpG dinucleotide"
  misc_feature (61)..(61): /note="Nucleotide may be methylated to form 5-methylcytosine"
caaagccattctgtgactcgctttcatttgcttcctacggtaacccggtaagataggtgtcgtcattcccatttcagagaagaataaactgaggctcagagaaacttagagatgtgccagga

SEQ ID NO: 4008 - DNA, 122 bp, Homo sapiens
  misc_feature (61)..(62): /note="This region represents a CpG dinucleotide"
  misc_feature (61)..(61): /note="Nucleotide may be methylated to form 5-methylcytosine"
ggcagaattatcactaggcactgcaaaaccttccattgaaatccacgtttaccatggtgacgtttgctagttacggcagagctgatcaactgcagattttcctgctgctgaggctaaattgc

SEQ ID NO: 4009 - DNA, 122 bp, Homo sapiens
  misc_feature (61)..(62): /note="This region represents a CpG dinucleotide"
  misc_feature (61)..(61): /note="Nucleotide may be methylated to form 5-methylcytosine"
caatcccaagtcggtaactaaatcggaacagctggagctctgcctggaatgtgaggattccggaccccaggagtagtccaggcaaacttttttggtctggatgatacatgtgatctacattc

SEQ ID NO: 4010 - DNA, 122 bp, Homo sapiens
  misc_feature (61)..(62): /note="This region represents a CpG dinucleotide"
  misc_feature (61)..(61): /note="Nucleotide may be methylated to form 5-methylcytosine"
tccagttacagaaggcaaaagccctccaagccttttttattgggcccttgtgagttctgccgttggctgagccagacagagttgaatggaggaatggcgaggtgtgtgtgtgtgtgtgtgca

SEQ ID NO: 4011 - DNA, 122 bp, Homo sapiens
  misc_feature (61)..(62): /note="This region represents a CpG dinucleotide"
  misc_feature (61)..(61): /note="Nucleotide may be methylated to form 5-methylcytosine"
gactgaggcagagaccagctctgtcctttaccagctggtgacctcagctaagtcatttaacgcactcaacctttagtttttcatctgcagaatggatataatggaaactaaacccacaggat

SEQ ID NO: 4012 - DNA, 122 bp, Homo sapiens
  misc_feature (61)..(62): /note="This region represents a CpG dinucleotide"
  misc_feature (61)..(61): /note="Nucleotide may be methylated to form 5-methylcytosine"
aagggggagctggaggggcaagcccagaggcagggccaacactgagctgcatggtccctgcgatggacaatctgagcctgaggtaaacgggctgatgtgggactgacggatgcaaggtgaca

SEQ ID NO: 4013 - DNA, 122 bp, Homo sapiens
  misc_feature (61)..(62): /note="This region represents a CpG dinucleotide"
  misc_feature (61)..(61): /note="Nucleotide may be methylated to form 5-methylcytosine"
agggatgtggacttgtttctatgaaagcctggaattcctgtaggggtagtgccgtaaaaccggatctttaccttccttatttaaaggacttttttgcgcatagactgcctgtcctggcctct

SEQ ID NO: 4014 - DNA, 122 bp, Homo sapiens
  misc_feature (61)..(62): /note="This region represents a CpG dinucleotide"
  misc_feature (61)..(61): /note="Nucleotide may be methylated to form 5-methylcytosine"
aaatcaatccataacaaacttgtaaacttcaaacaacccactgtgctttaacaacacatccgttacatacacaaaataatcatgtttgtaatgagcaatgcacaatattattctttccgata

SEQ ID NO: 4015 - DNA, 122 bp, Homo sapiens
  misc_feature (61)..(62): /note="This region represents a CpG dinucleotide"
  misc_feature (61)..(61): /note="Nucleotide may be methylated to form 5-methylcytosine"
tttaaaatttaaaaaaaaatgagaattacataattgtttttaaaccgttatccttggctacgaagatcaataacaaggtgacaccagtcggaaactggacaggaagttgctgggcagatgtt

SEQ ID NO: 4016 - DNA, 122 bp, Homo sapiens
  misc_feature (61)..(62): /note="This region represents a CpG dinucleotide"
  misc_feature (61)..(61): /note="Nucleotide may be methylated to form 5-methylcytosine"
tgcaaggtcttctgaggccgactctggaccttgcacaatattacttccaccacatgctaccgatcaaactaagccgcaagtccaacccagctgcaaggaatagggaagttgactccagcttt

SEQ ID NO: 4017 - DNA, 122 bp, Homo sapiens
  misc_feature (61)..(62): /note="This region represents a CpG dinucleotide"
  misc_feature (61)..(61): /note="Nucleotide may be methylated to form 5-methylcytosine"
ccagagcctctagtctgccatactactggacacaaaagttcaatatgttttcacttcattcgtttataagatattaacctgcattccaaacaccagggccctaactctggtggcctaagctc

SEQ ID NO: 4018 - DNA, 122 bp, Homo sapiens
  misc_feature (61)..(62): /note="This region represents a CpG dinucleotide"
  misc_feature (61)..(61): /note="Nucleotide may be methylated to form 5-methylcytosine"
tcatttaaaagacctgctctcttcgaaagtaatggtaacaataatcgtaataacagctaccgtgggtggctggcacgcttgctcagtgcacccctggaccgccactttacttgcactatttt

SEQ ID NO: 4019 - DNA, 122 bp, Homo sapiens
  misc_feature (61)..(62): /note="This region represents a CpG dinucleotide"
  misc_feature (61)..(61): /note="Nucleotide may be methylated to form 5-methylcytosine"
aaaaatattttccttacaattcataatgcagttcaactttttccattcaattctattacgcgtttaaatgctgactgtgaatcactcgcctgactcagggcccactaatgagctgtaatgcg

SEQ ID NO: 4020 - DNA, 122 bp, Homo sapiens
  misc_feature (61)..(62): /note="This region represents a CpG dinucleotide"
  misc_feature (61)..(61): /note="Nucleotide may be methylated to form 5-methylcytosine"
acagcagctgggatggtgtgggggcgacgtccagccagccctggacagtgggggcattctcgtatttttgaggcagccaggttggatgggacttgtctgcagttggtgcaggactgcctgta

SEQ ID NO: 4021 - DNA, 122 bp, Homo sapiens
  misc_feature (61)..(62): /note="This region represents a CpG dinucleotide"
  misc_feature (61)..(61): /note="Nucleotide may be methylated to form 5-methylcytosine"
cagttctgggaatggtgggaaccctcctgaaatccaagttcccagatgccagccaagggccggctttgtaagcaggcctttccaaggataagcagttagggctgctacctcaactttttgtt

SEQ ID NO: 4022 - DNA, 122 bp, Homo sapiens
  misc_feature (61)..(62): /note="This region represents a CpG dinucleotide"
  misc_feature (61)..(61): /note="Nucleotide may be methylated to form 5-methylcytosine"
tcttcccgggcgatctttgctctggtttttctctgcctctgacgctttctattacagcttcgtctctgcctatggaaatccgtcctcttcttcagggcccagctcaaaggctcatcaccacc

SEQ ID NO: 4023 - DNA, 122 bp, Homo sapiens
  misc_feature (61)..(62): /note="This region represents a CpG dinucleotide"
  misc_feature (61)..(61): /note="Nucleotide may be methylated to form 5-methylcytosine"
tcggttcttatactgtatgtgtactcaaatgtggccgtccttgggatttacagcaattaacgaattacgggagtgcgcacgaggcagcaagctctcggcagccgggctccggctcgggctcg

SEQ ID NO: 4024 - DNA, 122 bp, Homo sapiens
  misc_feature (61)..(62): /note="This region represents a CpG dinucleotide"
  misc_feature (61)..(61): /note="Nucleotide may be methylated to form 5-methylcytosine"
gaagccatgtattgttttccctccattttcaggcactagactgggtgtgaaggggagaggcggataagactcaatggcagagggctgacttttacaaaacaggacccttgggaaatgcacag

SEQ ID NO: 4025 - DNA, 122 bp, Homo sapiens
  misc_feature (61)..(62): /note="This region represents a CpG dinucleotide"
  misc_feature (61)..(61): /note="Nucleotide may be methylated to form 5-methylcytosine"
cagtttcaagaaaccaatctttcagacaacaccgggacctaggcccaggactgactcagacggtgactaaccgagcaggactcagccctcagatgctgaggaacacagctgggctagacaac

SEQ ID NO: 4026 - DNA, 122 bp, Homo sapiens
  misc_feature (61)..(62): /note="This region represents a CpG dinucleotide"
  misc_feature (61)..(61): /note="Nucleotide may be methylated to form 5-methylcytosine"
ccatatttcatgggccccctccctgagatgtgtttatccacgctgaccgatagttcaaagcggtcgtttggaagtggaataaagagtcgctctctaaattcaccaaaggagttaagaccagg

SEQ ID NO: 4027 - DNA, 122 bp, Homo sapiens
  misc_feature (61)..(62): /note="This region represents a CpG dinucleotide"
  misc_feature (61)..(61): /note="Nucleotide may be methylated to form 5-methylcytosine"
tggggcagagggccaggggcagggccagctgctgatcaagacagtgaaactggcattctccgtcaccaacaatgttattcggctgaaacctccttctaatgtggtgtcccccctggaacagg

SEQ ID NO: 4028 - DNA, 122 bp, Homo sapiens
  misc_feature (61)..(62): /note="This region represents a CpG dinucleotide"
  misc_feature (61)..(61): /note="Nucleotide may be methylated to form 5-methylcytosine"
agacacattttgaagtggcaagggcaactgtaagagacagaggcggctggcagcccacctcggggaggcgggacggcacaggctccgaacgctggcacagcaatttggcaaagcgtttcagt

SEQ ID NO: 4029 - DNA, 122 bp, Homo sapiens
  misc_feature (61)..(62): /note="This region represents a CpG dinucleotide"
  misc_feature (61)..(61): /note="Nucleotide may be methylated to form 5-methylcytosine"
attgttcttggcttttccaggtcaagccaagactgtcgagggggagccaaggtttcctggcgacatacccatgttcatccggtaccaccttacggcttcagtgagtgcagggatttccagaa

SEQ ID NO: 4030 - DNA, 122 bp, Homo sapiens
  misc_feature (61)..(62): /note="This region represents a CpG dinucleotide"
  misc_feature (61)..(61): /note="Nucleotide may be methylated to form 5-methylcytosine"
caaggtagtgtgtgaaagaaccgccccctcttgacaggaggatgaccgtcgccattcttgcgtgggactgactcacccagctgagaggaggaccaatagaaagaaaattcacatttgagtcc

SEQ ID NO: 4031 - DNA, 122 bp, Homo sapiens
  misc_feature (61)..(62): /note="This region represents a CpG dinucleotide"
  misc_feature (61)..(61): /note="Nucleotide may be methylated to form 5-methylcytosine"
tgtggagggcaccgaggaacaggggagcgcacacacaccacagaagctggaagtcagacccgacagttcccacgcagtggacattctcctctgaagccattgtgtggtgtgggacaagggag

SEQ ID NO: 4032 - DNA, 122 bp, Homo sapiens
  misc_feature (61)..(62): /note="This region represents a CpG dinucleotide"
  misc_feature (61)..(61): /note="Nucleotide may be methylated to form 5-methylcytosine"
gagtgactcagccagctgatgtcagatagcctctgtcatgggccccattagtgccactctcgaagactggtctagctattgctgctgcaaatgcccaacctgccagaaacagaaactgttac

SEQ ID NO: 4033 - DNA, 122 bp, Homo sapiens
  misc_feature (61)..(62): /note="This region represents a CpG dinucleotide"
  misc_feature (61)..(61): /note="Nucleotide may be methylated to form 5-methylcytosine"
gcaggactcagagcccatcaaaacatggatttcatagcttggcgtctggctgctaagcaacgcacttcttacattcaaaacagagttgtaaaagtagaatcttggtgccaactctgggtatt

SEQ ID NO: 4034 - DNA, 122 bp, Homo sapiens
  misc_feature (61)..(62): /note="This region represents a CpG dinucleotide"
  misc_feature (61)..(61): /note="Nucleotide may be methylated to form 5-methylcytosine"
attgttactcacaaatggagtattacggatccctggttctttttcacctttcatttcttgcgactgatgtaactttttgtatcagtagcaatagaaacagaaactcaaaatatctcaaggca

SEQ ID NO: 4035 - DNA, 122 bp, Homo sapiens
  misc_feature (61)..(62): /note="This region represents a CpG dinucleotide"
  misc_feature (61)..(61): /note="Nucleotide may be methylated to form 5-methylcytosine"
tgtcagatgtcgagggcagtcatatgcacggggatagcaatttgcctggactcatctccacgcctgaagaggcaggtatgagtcaggggtgagtgttgaagagtgtgatgaatgggtggaag

SEQ ID NO: 4036 - DNA, 122 bp, Homo sapiens
  misc_feature (61)..(62): /note="This region represents a CpG dinucleotide"
  misc_feature (61)..(61): /note="Nucleotide may be methylated to form 5-methylcytosine"
tgtgctaagatagttggctagctatatgcaaaagaataaaactggagccccacttttcaccgtatattaaaattaactcaaaacaaattgagaatttaaatgtaacccttcaagctataaga

SEQ ID NO: 4037 - DNA, 122 bp, Homo sapiens
  misc_feature (61)..(62): /note="This region represents a CpG dinucleotide"
  misc_feature (61)..(61): /note="Nucleotide may be methylated to form 5-methylcytosine"
ggatgccatgacagttgatttgataagcacgtggctatgcaatgactaacaggtgggtagcgtctacagtgtagatatgctggacaaagggatgattcacatctcaggctggacggagcagg

SEQ ID NO: 4038 - DNA, 122 bp, Homo sapiens
  misc_feature (61)..(62): /note="This region represents a CpG dinucleotide"
  misc_feature (61)..(61): /note="Nucleotide may be methylated to form 5-methylcytosine"
agtgttttcacctattttatattccttttgagctttgtctagagagattacatgtgctaccgactggtataagaggtggtgtgaagcaatgtatgccttttaacaacagttttgccaaaagg

SEQ ID NO: 4039 - DNA, 122 bp, Homo sapiens
  misc_feature (61)..(62): /note="This region represents a CpG dinucleotide"
  misc_feature (61)..(61): /note="Nucleotide may be methylated to form 5-methylcytosine"
cttgaaaaataaaaacaacccaaattttgaattatgacaaccccaactggtgcacgaaatcgctgactacttctgtgctggtgaccacagagcccagtgtaagaggtcctggtcaccggcac

SEQ ID NO: 4040 - DNA, 122 bp, Homo sapiens
  misc_feature (61)..(62): /note="This region represents a CpG dinucleotide"
  misc_feature (61)..(61): /note="Nucleotide may be methylated to form 5-methylcytosine"
ccatgtggctgcactggagtctctctgagcctactctggcactggaggctgccagattcacgaattgttttttgctcaattaaattctcttaaatttaatttggctatggattttcttttaa

SEQ ID NO: 4041 - DNA, 122 bp, Homo sapiens
  misc_feature (61)..(62): /note="This region represents a CpG dinucleotide"
  misc_feature (61)..(61): /note="Nucleotide may be methylated to form 5-methylcytosine"
cgacacctagcccaaaccccgtgcgatggcgaagcttcgcggagctaatagccttctcggcgacggccaccccggagccggtcccctcctgccgcaagttcagctcagaccaggacgattcc

SEQ ID NO: 4042 - DNA, 122 bp, Homo sapiens
  misc_feature (61)..(62): /note="This region represents a CpG dinucleotide"
  misc_feature (61)..(61): /note="Nucleotide may be methylated to form 5-methylcytosine"
cacctgaggctggacacagtgactcacgcctccgacctcagcacctgggagtcccggagacgatcactttagcacaagacctcagcagcgacctgggcaacacagtgagactctgtctctaa

SEQ ID NO: 4043 - DNA, 122 bp, Homo sapiens
  misc_feature (61)..(62): /note="This region represents a CpG dinucleotide"
  misc_feature (61)..(61): /note="Nucleotide may be methylated to form 5-methylcytosine"
gaagaaagattacatttccagtccagtttctaatcccaagtatccatgcacccaggatggcgggaaaagggaaaaggcggtaccttaaatgagggaaggacatctcagtcttggccagttct

SEQ ID NO: 4044 - DNA, 122 bp, Homo sapiens
  misc_feature (61)..(62): /note="This region represents a CpG dinucleotide"
  misc_feature (61)..(61): /note="Nucleotide may be methylated to form 5-methylcytosine"
gctgtaacttagagatcataggcaaaagataactgcaactccttctccaaacactcccttcgcaatcaacaaaagatgacattccaaaaacaaattatatataagcctttgaattcctaagt

SEQ ID NO: 4045 - DNA, 122 bp, Homo sapiens
  misc_feature (61)..(62): /note="This region represents a CpG dinucleotide"
  misc_feature (61)..(61): /note="Nucleotide may be methylated to form 5-methylcytosine"
gtaggtattaatgcctgtattctatagacgaggaaactgaggctcagggagattgagtcacgtgcccaatgtcacgtagctggtaaatgacagaactaggatttgaaaccagatgagctggg

SEQ ID NO: 4046 - DNA, 122 bp, Homo sapiens
  misc_feature (61)..(62): /note="This region represents a CpG dinucleotide"
  misc_feature (61)..(61): /note="Nucleotide may be methylated to form 5-methylcytosine"
atcacttcccagagggtcacacagctagtaagtgactgaactgggttttgaacccaggcccgattaactccatttggccctcttttaccttaaggcacaggaaaattttggatttgtggtct

SEQ ID NO: 4047 - DNA, 122 bp, Homo sapiens
  misc_feature (61)..(62): /note="This region represents a CpG dinucleotide"
  misc_feature (61)..(61): /note="Nucleotide may be methylated to form 5-methylcytosine"
agagccttctatcacttagtaccgtgtcatataccacttccacaaatgctagggaatgaacgaatacatgtatgaatgaatgaatgtccatggggtcactcagaagtagtggcataatttag

SEQ ID NO: 4048 - DNA, 122 bp, Homo sapiens
  misc_feature (61)..(62): /note="This region represents a CpG dinucleotide"
  misc_feature (61)..(61): /note="Nucleotide may be methylated to form 5-methylcytosine"
aacacagaactagccagacctgttcctctgcccctcatcgaggccatcccagttactcagcgaataccaaattccaaataccgggaacctgaagctgcctttactcatgaaactgcccccac

SEQ ID NO: 4049 - DNA, 122 bp, Homo sapiens
  misc_feature (61)..(62): /note="This region represents a CpG dinucleotide"
  misc_feature (61)..(61): /note="Nucleotide may be methylated to form 5-methylcytosine"
ctcagactgtggatgaagcagatgacctgctcagctttccttccaacattgctgtttgagcgcatacagccctttccttgttttgaagacactagccagctcagccagagatgctctttgcc

SEQ ID NO: 4050 - DNA, 122 bp, Homo sapiens
  misc_feature (61)..(62): /note="This region represents a CpG dinucleotide"
  misc_feature (61)..(61): /note="Nucleotide may be methylated to form 5-methylcytosine"
tagagtgcatttttaggtcagagtaattctgataccagtctccagggcccagagcaccagcgcagacacacacaggtgtgcgcacccacacagtcacatccattatccagaaaacccagcaa

SEQ ID NO: 4051 - DNA, 122 bp, Homo sapiens
  misc_feature (61)..(62): /note="This region represents a CpG dinucleotide"
  misc_feature (61)..(61): /note="Nucleotide may be methylated to form 5-methylcytosine"
agttacttgagctgctgttgctgctaaaagatgtttgaagaggaggaggaaaagccatctcgatatgacaaggatttgtcacttgctgcaaagaaggcacgggattttttttttttccctgt

SEQ ID NO: 4052 - DNA, 122 bp, Homo sapiens
  misc_feature (61)..(62): /note="This region represents a CpG dinucleotide"
  misc_feature (61)..(61): /note="Nucleotide may be methylated to form 5-methylcytosine"
ctaaatgttgggtcattctcacttgactgtcttgtagttgttggaaaagctatttggcttcgctgtccagtgcctgcagatgaagttgcttctcctcatcgagaaatagatgcatcttttga

SEQ ID NO: 4053 - DNA, 122 bp, Homo sapiens
  misc_feature (61)..(62): /note="This region represents a CpG dinucleotide"
  misc_feature (61)..(61): /note="Nucleotide may be methylated to form 5-methylcytosine"
atgccaattccagacactcattcccaagtctgcaaattgttgtatcctttcttgtagtgacgctccctcgagcatcacagattttacacatttgttagatttaaagcaagcatgtgcaccct

SEQ ID NO: 4054 - DNA, 122 bp, Homo sapiens
  misc_feature (61)..(62): /note="This region represents a CpG dinucleotide"
  misc_feature (61)..(61): /note="Nucleotide may be methylated to form 5-methylcytosine"
tgtccttgcagccaaggtaggtaacgatcgtacctaccacatgaggtggtcatgagaaaacgacactcacgaagcactcgagcgcacctggctcatactgaagccacggaaggcttcctatg

SEQ ID NO: 4055 - DNA, 122 bp, Homo sapiens
  misc_feature (61)..(62): /note="This region represents a CpG dinucleotide"
  misc_feature (61)..(61): /note="Nucleotide may be methylated to form 5-methylcytosine"
tgaggatgatcatgtttaataaacaaggcacaaacatttcagctctgctatatccccaggcgtctctcccaaaatcagtttacttctctactttacaagaaaaatcggttagcttcagggtt

SEQ ID NO: 4056 - DNA, 122 bp, Homo sapiens
  misc_feature (61)..(62): /note="This region represents a CpG dinucleotide"
  misc_feature (61)..(61): /note="Nucleotide may be methylated to form 5-methylcytosine"
tctccctgaccttgactgccaggagcaggctttggaatacaaagaggtggagaagaagggcggtagagaaagggtaacaagctgttcttccagatttcctagcaagtcttagataatggtaa

SEQ ID NO: 4057 - DNA, 122 bp, Homo sapiens
  misc_feature (61)..(62): /note="This region represents a CpG dinucleotide"
  misc_feature (61)..(61): /note="Nucleotide may be methylated to form 5-methylcytosine"
tctgcagccagcaggctccttgatgtgggagattaaaagctgcactcatctggggggttacgtcatgacccgctcaataaaaagaacatggattcagagctaggagatttgaggagctctgg

SEQ ID NO: 4058 - DNA, 122 bp, Homo sapiens
  misc_feature (61)..(62): /note="This region represents a CpG dinucleotide"
  misc_feature (61)..(61): /note="Nucleotide may be methylated to form 5-methylcytosine"
aaaccctctttttggaagccaagaaggcaaagttccattttttcttggcaaggcactttacgagactctgagtgtctttggactctgtattttggtagcttggaattagcctgggaacactt

SEQ ID NO: 4059 - DNA, 122 bp, Homo sapiens
  misc_feature (61)..(62): /note="This region represents a CpG dinucleotide"
  misc_feature (61)..(61): /note="Nucleotide may be methylated to form 5-methylcytosine"
gagctggaagccagcactgggctcttccgcacagaggctcccacccatagaccaggagtacgaacccaaccgtgctgctctagacatgggccctgggatgatcacccaacctctgtgtcccg

SEQ ID NO: 4060 - DNA, 122 bp, Homo sapiens
  misc_feature (61)..(62): /note="This region represents a CpG dinucleotide"
  misc_feature (61)..(61): /note="Nucleotide may be methylated to form 5-methylcytosine"
ttaaatatctaataaaaaatatatagcaaatgcagtttgtaaactatgacaatatgaccacgcaaaagattattatcttccaagactgctggtccaaggaaaggtcagtaataaagtggaag

SEQ ID NO: 4061 - DNA, 122 bp, Homo sapiens
  misc_feature (61)..(62): /note="This region represents a CpG dinucleotide"
  misc_feature (61)..(61): /note="Nucleotide may be methylated to form 5-methylcytosine"
ctgaaagtctggtgagaagacacggcgagaatcggggtccagcacagatgatggcgacagcggagaagggaaggtaagggagggggctcaagcttttatcgttatgggacctcctgtgtcta

SEQ ID NO: 4062 - DNA, 122 bp, Homo sapiens
  misc_feature (61)..(62): /note="This region represents a CpG dinucleotide"
  misc_feature (61)..(61): /note="Nucleotide may be methylated to form 5-methylcytosine"
caatcttaatcccattaaattggatgctgtgtctatacacacgcaggacctaggaggacacgtcaaactgtaaactgcttgtgattgtggataactttgttctttgcttcttgtgtttttca

SEQ ID NO: 4063 - DNA, 122 bp, Homo sapiens
  misc_feature (61)..(62): /note="This region represents a CpG dinucleotide"
  misc_feature (61)..(61): /note="Nucleotide may be methylated to form 5-methylcytosine"
tggacaccaaagactcaggtgagcttccctagtgagcaatactctgtgtatactgtcacgcgttgtggccaagagaaggtaacactgtctatgactccaccagcaatgatggccagaagctc

SEQ ID NO: 4064 - DNA, 122 bp, Homo sapiens
  misc_feature (61)..(62): /note="This region represents a CpG dinucleotide"
  misc_feature (61)..(61): /note="Nucleotide may be methylated to form 5-methylcytosine"
ttgtcatacaaagcttctattaaagcatcaggagtgccatgtggaagcccccttattttccgtagggacaggcagtgttgctcttgctaaggcagtgacctattattgaaccgttttgcatg

SEQ ID NO: 4065 - DNA, 122 bp, Homo sapiens
  misc_feature (61)..(62): /note="This region represents a CpG dinucleotide"
  misc_feature (61)..(61): /note="Nucleotide may be methylated to form 5-methylcytosine"
taagatgccagcaagtttggtttctggtgagggccctcttcctggctggtagacagctgccgtctccctctatcctcacgtggcagagagagtgctccggtatttccttctcttaagcggat

SEQ ID NO: 4066 - DNA, 122 bp, Homo sapiens
  misc_feature (61)..(62): /note="This region represents a CpG dinucleotide"
  misc_feature (61)..(61): /note="Nucleotide may be methylated to form 5-methylcytosine"
catcagaagttgaaagaactgggagaaaatatgtactcagagcatgagatgacttgggcacgcggctcagttaaggctataaacaatgagtcaactggaggtccactttgtggtgtaaaagc

SEQ ID NO: 4067 - DNA, 122 bp, Homo sapiens
  misc_feature (61)..(62): /note="This region represents a CpG dinucleotide"
  misc_feature (61)..(61): /note="Nucleotide may be methylated to form 5-methylcytosine"
cataggcttctacgaaggggggcgggggctcccctcggtgaccacgtcctctgccccccccgccacttggctccgtggtacgtcccgacctctgctgaattgtcacacccccctgctctcct

SEQ ID NO: 4068 - DNA, 122 bp, Homo sapiens
  misc_feature (61)..(62): /note="This region represents a CpG dinucleotide"
  misc_feature (61)..(61): /note="Nucleotide may be methylated to form 5-methylcytosine"
atccccaaggcagggagaggattaaacagaccacttgatcagttcagaaccatgatgttacggagatgcttgattggggaaagcattccctaaactaggtataatctcagatatcagggcta

SEQ ID NO: 4069 - DNA, 122 bp, Homo sapiens
  misc_feature (61)..(62): /note="This region represents a CpG dinucleotide"
  misc_feature (61)..(61): /note="Nucleotide may be methylated to form 5-methylcytosine"
tgagtgaaagttcccagctcgtggaggagagaagagcagttctgtgggtttggccttagacgacaaaggctagggttcactgccccgtgcagacacagtccacaggcactgtcactctgaca

SEQ ID NO: 4070 - DNA, 122 bp, Homo sapiens
  misc_feature (61)..(62): /note="This region represents a CpG dinucleotide"
  misc_feature (61)..(61): /note="Nucleotide may be methylated to form 5-methylcytosine"
ttcacatcagggagatgcacagcgaatgcctctctcagggtccaccccggagaggctgggcggtaccatttcagttccgtagacgttggaagagcagcctgtttgtttatgagatttcaggg

SEQ ID NO: 4071 - DNA, 122 bp, Homo sapiens
  misc_feature (61)..(62): /note="This region represents a CpG dinucleotide"
  misc_feature (61)..(61): /note="Nucleotide may be methylated to form 5-methylcytosine"
aggaatgtgagtatgacttagtcacctagtgatggtattctagattacgacccacagcaccggaggtgcatctgtgaggaggagctggcagctagcactgcagaacattatatagcccaaca

SEQ ID NO: 4072 - DNA, 122 bp, Homo sapiens
  misc_feature (61)..(62): /note="This region represents a CpG dinucleotide"
  misc_feature (61)..(61): /note="Nucleotide may be methylated to form 5-methylcytosine"
atttttttcagggcctgaaattatgctttcatgttctcatgccaaagaaaggtaagttcgcgtgagcctgggatctgtcctgccataggaattcttcacaggaactcttcacaggatttctg

SEQ ID NO: 4073 - DNA, 122 bp, Homo sapiens
  misc_feature (61)..(62): /note="This region represents a CpG dinucleotide"
  misc_feature (61)..(61): /note="Nucleotide may be methylated to form 5-methylcytosine"
taactttgtgtctgtatgtatgatgggctgcattttgaaatcttcatgcaggcctggcctcggtatagagttctgaagacaacagttttatctctgtaagctgtaggagcatttggactcct

SEQ ID NO: 4074 - DNA, 122 bp, Homo sapiens
  misc_feature (61)..(62): /note="This region represents a CpG dinucleotide"
  misc_feature (61)..(61): /note="Nucleotide may be methylated to form 5-methylcytosine"
gggtaaatggaatgcattctataaactgtacccttttgttacaatgaacccaattgctcccgtcgttcataatctggcccagcaagccaattctttgttccattgctaatccatagtgcaga

SEQ ID NO: 4075 - DNA, 122 bp, Homo sapiens
  misc_feature (61)..(62): /note="This region represents a CpG dinucleotide"
  misc_feature (61)..(61): /note="Nucleotide may be methylated to form 5-methylcytosine"
tgacgtgattggaatgtgaccccttctctcctacatgttgctgtcctggttctgaaatgacgaccttaatctctgactccatgtgtcgctgactgtgctcttgcctttgacctgatgctgga

SEQ ID NO: 4076 - DNA, 122 bp, Homo sapiens
  misc_feature (61)..(62): /note="This region represents a CpG dinucleotide"
  misc_feature (61)..(61): /note="Nucleotide may be methylated to form 5-methylcytosine"
aagaaggaagccccttataaaaccatcagactgcttgagaactcactatcatgggaatagcgtgggggaagctgcccccatgattcagttacctcccactgggtccctcccaccacacgtga

SEQ ID NO: 4077 - DNA, 122 bp, Homo sapiens
  misc_feature (61)..(62): /note="This region represents a CpG dinucleotide"
  misc_feature (61)..(61): /note="Nucleotide may be methylated to form 5-methylcytosine"
gtgtggaaaacaaaggcagagagtaggtaacaccagacgggacactcacggttgagctggcgcctccggatcctgtccctccatggcctgtttctgatccagtgtaatcgcgaaggtaacac

SEQ ID NO: 4078 - DNA, 122 bp, Homo sapiens
  misc_feature (61)..(62): /note="This region represents a CpG dinucleotide"
  misc_feature (61)..(61): /note="Nucleotide may be methylated to form 5-methylcytosine"
gatgatggtggctggaacacagttcccatcagcaaaggtagccgccccattgacacctcacgactcaccaagatcaccaaggtaggggtgtgtgtgggagtgggtgattcagctcaggttta

SEQ ID NO: 4079 - DNA, 122 bp, Homo sapiens
  misc_feature (61)..(62): /note="This region represents a CpG dinucleotide"
  misc_feature (61)..(61): /note="Nucleotide may be methylated to form 5-methylcytosine"
cattgcgcgcctgttgagcagccagccaggtagaattgggagtcctgctcgcagccatcacggttagaggccttcgagacgaacagatttgctactacttcaggaatgccagcagttctgtt

SEQ ID NO: 4080 - DNA, 122 bp, Homo sapiens
  misc_feature (61)..(62): /note="This region represents a CpG dinucleotide"
  misc_feature (61)..(61): /note="Nucleotide may be methylated to form 5-methylcytosine"
tgtgtcattacttgtcatgaattactcctgacattcttagcaacataaatgagtcagttacgtaagatgtctggcatagcctgatagtccttggaatggagggtctatctctgttgcagaca

SEQ ID NO: 4081 - DNA, 122 bp, Homo sapiens
  misc_feature (61)..(62): /note="This region represents a CpG dinucleotide"
  misc_feature (61)..(61): /note="Nucleotide may be methylated to form 5-methylcytosine"
ctggaactgttcgcaacaacaattacaggttgcaagataccatctatagatctgtgactccggaacagctaaaacctggaaacagaaaacttggttgagtctcagaatgggtatgtgaaaag

SEQ ID NO: 4082 - DNA, 122 bp, Homo sapiens
  misc_feature (61)..(62): /note="This region represents a CpG dinucleotide"
  misc_feature (61)..(61): /note="Nucleotide may be methylated to form 5-methylcytosine"
ctctgtattttctaggtgtgcagtggttttctagttgaacagaaaaatgctagtacgtaacgaatgaatccatccattgttggaaggatgatgatgttacgattatagaaaaaatccttatt

SEQ ID NO: 4083 - DNA, 122 bp, Homo sapiens
  misc_feature (61)..(62): /note="This region represents a CpG dinucleotide"
  misc_feature (61)..(61): /note="Nucleotide may be methylated to form 5-methylcytosine"
tctcatgttcggacatgcgctgtccttgaagaatttgagtagacagtgtaaacgcccatgcgtggcgaacagcataagcaaaaaaacacatgcaaatacatcatcgggaaaaataatttggc

SEQ ID NO: 4084 - DNA, 122 bp, Homo sapiens
  misc_feature (61)..(62): /note="This region represents a CpG dinucleotide"
  misc_feature (61)..(61): /note="Nucleotide may be methylated to form 5-methylcytosine"
aaggattatacacttttaagaactcctgtgaagcaatccaatgagatttgtaacctcccccgttgctggcctctcctgcatttgattccaggctctagagaacagtgattctcaactctttt

SEQ ID NO: 4085 - DNA, 122 bp, Homo sapiens
  misc_feature (61)..(62): /note="This region represents a CpG dinucleotide"
  misc_feature (61)..(61): /note="Nucleotide may be methylated to form 5-methylcytosine"
aagataacgataacgatgacaatgctggtaatagtgatgacaaaagttagaaccttctgacgcagcttttgacttatgtgctacatccagtgttggagcttggtttttatgggctgggtaag

SEQ ID NO: 4086 - DNA, 122 bp, Homo sapiens
  misc_feature (61)..(62): /note="This region represents a CpG dinucleotide"
  misc_feature (61)..(61): /note="Nucleotide may be methylated to form 5-methylcytosine"
gttcaggatggtaaactcttgtgtgacacagttctacctggagcatgtgaactccaaaggcggggtgctagcgctggctgttttaaaatgcatcagccttctacaaaaggtgtggtttaatc

SEQ ID NO: 4087 - DNA, 122 bp, Homo sapiens
  misc_feature (61)..(62): /note="This region represents a CpG dinucleotide"
  misc_feature (61)..(61): /note="Nucleotide may be methylated to form 5-methylcytosine"
aaaacagcgtatgctgtaagtaatctaaagtcacagtcactccgggatgtgtctcctacacgtcttcagaagcttatctctcctctcccttttcttactgttcctcggtttctcaatcttat

SEQ ID NO: 4088 - DNA, 122 bp, Homo sapiens
  misc_feature (61)..(62): /note="This region represents a CpG dinucleotide"
  misc_feature (61)..(61): /note="Nucleotide may be methylated to form 5-methylcytosine"
ctgggttgaaggcagcagagctagagttagaagccctgtttaccctggtgaatcctaatccgtgtcccaagcatcatgtcttctgtgactcacatccatcactcacccaactgtgtggactt

SEQ ID NO: 4089 - DNA, 122 bp, Homo sapiens
  misc_feature (61)..(62): /note="This region represents a CpG dinucleotide"
  misc_feature (61)..(61): /note="Nucleotide may be methylated to form 5-methylcytosine"
cagggtatcattcatatcattctgcaaaccctactctaaaacaacaaccacaaaaatgagcgtgaagataaagttattctcaggtatacaacagaagaggtaggagaggatgaataccttga

SEQ ID NO: 4090 - DNA, 122 bp, Homo sapiens
  misc_feature (61)..(62): /note="This region represents a CpG dinucleotide"
  misc_feature (61)..(61): /note="Nucleotide may be methylated to form 5-methylcytosine"
ccataactgagacctgaagtgtgtttggtccgaactcgtaaagtctgggccctctgttgacgggccatatcgcatgtctgatttggatgccatatctgcttgcagtggtagcagaactcagt

SEQ ID NO: 4091 - DNA, 122 bp, Homo sapiens
  misc_feature (61)..(62): /note="This region represents a CpG dinucleotide"
  misc_feature (61)..(61): /note="Nucleotide may be methylated to form 5-methylcytosine"
aagaggcccagcttctacacctggctctgctattagctcacactgtgactttggacaagtcgctccacctgctttggcctcaactttctgatctataaaattaaaggattagaaaagatgat

SEQ ID NO: 4092 - DNA, 122 bp, Homo sapiens
  misc_feature (61)..(62): /note="This region represents a CpG dinucleotide"
  misc_feature (61)..(61): /note="Nucleotide may be methylated to form 5-methylcytosine"
gcacggtccctgccctcacagaaaatctcatacacagagcaaaatgatcttgttatcatccgtttctggattttgcaccttagttcttgtctcatgtcatcattgaagcaagactttaatga

SEQ ID NO: 4093 - DNA, 122 bp, Homo sapiens
  misc_feature (61)..(62): /note="This region represents a CpG dinucleotide"
  misc_feature (61)..(61): /note="Nucleotide may be methylated to form 5-methylcytosine"
gggatctgcttatgattctaataagtccttctctgtcaagaaccaggatgcagcaaacagcgcatgtttaagcccatgcactttggagccaggcagagctgtgttgtcttggctctcttgct

SEQ ID NO: 4094 - DNA, 122 bp, Homo sapiens
  misc_feature (61)..(62): /note="This region represents a CpG dinucleotide"
  misc_feature (61)..(61): /note="Nucleotide may be methylated to form 5-methylcytosine"
taattaatgatagatggaatgacagaaaaaaatcactaataaaataacagatttaggcaacgataatcaatggttgttaaaaccattaggtgaaaggctgaggcaaaactttacaatggatg

SEQ ID NO: 4095 - DNA, 122 bp, Homo sapiens
  misc_feature (61)..(62): /note="This region represents a CpG dinucleotide"
  misc_feature (61)..(61): /note="Nucleotide may be methylated to form 5-methylcytosine"
gagctgagcatcagtgagtgaggggaaagcagtggttttttgtcttgagaagaagttcagcgctcagttaaccagaacaagtgccacctgtataagacagcagacggtcaaagcagaagagg

SEQ ID NO: 4096 - DNA, 122 bp, Homo sapiens
  misc_feature (61)..(62): /note="This region represents a CpG dinucleotide"
  misc_feature (61)..(61): /note="Nucleotide may be methylated to form 5-methylcytosine"
gccaactcagctcttggcttggtgacccgagggttctcaggccacatcctcagagacagccggtgccacggacacatccgttgtcttgttgccacacgatagctattgaaaaccccaaagtg

SEQ ID NO: 4097 - DNA, 122 bp, Homo sapiens
  misc_feature (61)..(62): /note="This region represents a CpG dinucleotide"
  misc_feature (61)..(61): /note="Nucleotide may be methylated to form 5-methylcytosine"
aggctgctagcaaacttgtccaaactttgccctggagaagatgttatctttattgttctgcgcagggaaacagatctgcactttgccccacagagagaaactatgtatcttctaaggttgtt

SEQ ID NO: 4098 - DNA, 122 bp, Homo sapiens
  misc_feature (61)..(62): /note="This region represents a CpG dinucleotide"
  misc_feature (61)..(61): /note="Nucleotide may be methylated to form 5-methylcytosine"
ggtgccttttccgccgagactgcgtgatgggaaaacagacaggggagcctatgtgtgtcccgtgggatgggagattcagaagcaacttaagaaatttttgtaaagaactttgaaactgatga

SEQ ID NO: 4099 - DNA, 122 bp, Homo sapiens
  misc_feature (61)..(62): /note="This region represents a CpG dinucleotide"
  misc_feature (61)..(61): /note="Nucleotide may be methylated to form 5-methylcytosine"
agtagaattatagcgttctcagctcccacacagtggcacacccctgagaaggttgagtcacgacctgtcatccgctgatcctagttaatgcatggtccccgcacagccaggcttaccttctg

SEQ ID NO: 4100 - DNA, 122 bp, Homo sapiens
  misc_feature (61)..(62): /note="This region represents a CpG dinucleotide"
  misc_feature (61)..(61): /note="Nucleotide may be methylated to form 5-methylcytosine"
aaaacagcattctggttgattcttacgcatgttatgttggctacctatcaagagatggagcggagagacacaaacatggatataaagctctgggacctttgaatagtgaatctgtcctccaa

SEQ ID NO: 4101 - DNA, 122 bp, Homo sapiens
  misc_feature (61)..(62): /note="This region represents a CpG dinucleotide"
  misc_feature (61)..(61): /note="Nucleotide may be methylated to form 5-methylcytosine"
cttcaggctctgaagtacttgaacaccatgggattcctgccttacagaagttaatgagcacgactcaggcagattcataattctccttagaagccatttgggatggcttccactttggggtc

SEQ ID NO: 4102 - DNA, 122 bp, Homo sapiens
  misc_feature (61)..(62): /note="This region represents a CpG dinucleotide"
  misc_feature (61)..(61): /note="Nucleotide may be methylated to form 5-methylcytosine"
tctcttcaataatcttgcaatcaggaagcctgcccctctagaaccacaaaactgctgccgcgaacaggaaaccactacaatcaggaagccgctactgctgccgggctccagaaccagtgcac

SEQ ID NO: 4103 - DNA, 122 bp, Homo sapiens
  misc_feature (61)..(62): /note="This region represents a CpG dinucleotide"
  misc_feature (61)..(61): /note="Nucleotide may be methylated to form 5-methylcytosine"
gatttgcttttgaaaacatatcctgaaccctcaggtcaggtacagctgtcagtgtcgtggcgtctcctgggtggttccatgctcttttcagcagcccagcacactgggccagagacaggcaa

SEQ ID NO: 4104 - DNA, 122 bp, Homo sapiens
  misc_feature (61)..(62): /note="This region represents a CpG dinucleotide"
  misc_feature (61)..(61): /note="Nucleotide may be methylated to form 5-methylcytosine"
ttaaaaaaaaaaaaaatccacacacagcaaaccagggtacactttcaagttagaacccagcgagaaggcagggcagggaagttactgctccatctcacagaagaaaaaggcagagatggaag

SEQ ID NO: 4105 - DNA, 122 bp, Homo sapiens
  misc_feature (61)..(62): /note="This region represents a CpG dinucleotide"
  misc_feature (61)..(61): /note="Nucleotide may be methylated to form 5-methylcytosine"
cgggaggcgtgggagcgcagggcgccccgggtccggatccggctacaggggcgaacagagcgggttctccatcccctggggtgaaatctctgggcccaggctttgagaccctctaactcgcc

SEQ ID NO: 4106 - DNA, 122 bp, Homo sapiens
  misc_feature (61)..(62): /note="This region represents a CpG dinucleotide"
  misc_feature (61)..(61): /note="Nucleotide may be methylated to form 5-methylcytosine"
ggtctcactatgtcacccaggctggttttgaaatcctcagctaaagtgatccttctggatcggcttcccaaagtactgggattacaggtgtgagtcactgcaccagggccattcagtcttat

SEQ ID NO: 4107 - DNA, 122 bp, Homo sapiens
  misc_feature (61)..(62): /note="This region represents a CpG dinucleotide"
  misc_feature (61)..(61): /note="Nucleotide may be methylated to form 5-methylcytosine"
agaagaggccagactggagctcaataaagccaggactcactgcttttgtggacagcagtgcgcagacttaggttctcctgcttgagtttctggttgctgtgttgcagaaagcgaatgtagtc

SEQ ID NO: 4108 - DNA, 122 bp, Homo sapiens
  misc_feature (61)..(62): /note="This region represents a CpG dinucleotide"
  misc_feature (61)..(61): /note="Nucleotide may be methylated to form 5-methylcytosine"
gctcatcatggtcagccttccacttcttgatggtttccttctgctatgaatgcgcatgtccggttgtctgcttcttagagcagacatttacctgaaagaaaatgttacaataattagttact

SEQ ID NO: 4109 - DNA, 122 bp, Homo sapiens
  misc_feature (61)..(62): /note="This region represents a CpG dinucleotide"
  misc_feature (61)..(61): /note="Nucleotide may be methylated to form 5-methylcytosine"
acctcacacactggtttcgtccttgaggcacggcctcattacctcaggaacaccaggcagcgcttccacactgtgcttggagccattttaaacagcacaagggttgatcgacaagtacaaac

SEQ ID NO: 4110 - DNA, 122 bp, Homo sapiens
  misc_feature (61)..(62): /note="This region represents a CpG dinucleotide"
  misc_feature (61)..(61): /note="Nucleotide may be methylated to form 5-methylcytosine"
tttcctgagcgtgaaagtctcctcattctgtgggttaggagttggtcattgaagggctgacgcttaagagcccagatctcccaactcccttagttggcccttccgggagccgcccggtctct

SEQ ID NO: 4111 - DNA, 122 bp, Homo sapiens
  misc_feature (61)..(62): /note="This region represents a CpG dinucleotide"
  misc_feature (61)..(61): /note="Nucleotide may be methylated to form 5-methylcytosine"
gcctgtggaatgctgtttacttgtgctcttgcaacgggactggcctgcctgaaatgtctgcggaccatgaccacccacactatgggaagcatgatgattaaagagtgtgctggatctcggta

SEQ ID NO: 4112 - DNA, 122 bp, Homo sapiens
  misc_feature (61)..(62): /note="This region represents a CpG dinucleotide"
  misc_feature (61)..(61): /note="Nucleotide may be methylated to form 5-methylcytosine"
ctctcctaatcgttttcctaggatatttccacagtggatgacaccctgcctcagtccttgcgcagctggattacatgcttcctggggataatcagcacccttgtcatgatctgcatggccac

SEQ ID NO: 4113 - DNA, 122 bp, Homo sapiens
  misc_feature (61)..(62): /note="This region represents a CpG dinucleotide"
  misc_feature (61)..(61): /note="Nucleotide may be methylated to form 5-methylcytosine"
cacaaagcagcagactagaggttctcaacagagagtgttgtcaaatacctttgtggaatgcgctatacaacattaggttatcggtatttgagtggcctgtgattttattgcagggagaatcg

SEQ ID NO: 4114 - DNA, 122 bp, Homo sapiens
  misc_feature (61)..(62): /note="This region represents a CpG dinucleotide"
  misc_feature (61)..(61): /note="Nucleotide may be methylated to form 5-methylcytosine"
taagtagtttttctatctttaaagtacacaaagagtttcctggacatgttcttaaaattccggttccaggtgtacaccacaagattctgactcagtaagtttggaaaagtagaataagaatc

SEQ ID NO: 4115 - DNA, 122 bp, Homo sapiens
  misc_feature (61)..(62): /note="This region represents a CpG dinucleotide"
  misc_feature (61)..(61): /note="Nucleotide may be methylated to form 5-methylcytosine"
acatccttcatgagcattcctcaaactctgcctgaatgtctccagagcccgagaactcaccgcttctttggtggccccttccagctggggacagttctgaaataaagctcttccttctcagc

SEQ ID NO: 4116 - DNA, 122 bp, Homo sapiens
  misc_feature (61)..(62): /note="This region represents a CpG dinucleotide"
  misc_feature (61)..(61): /note="Nucleotide may be methylated to form 5-methylcytosine"
tcgcagatcccaatttgctgtatctcctgacctgccttctaagggaagtctaaatttgctcgcttttcacattcacggtgcataatcagcctgtgatactccactttgctaattgatttaca

SEQ ID NO: 4117 - DNA, 122 bp, Homo sapiens
  misc_feature (61)..(62): /note="This region represents a CpG dinucleotide"
  misc_feature (61)..(61): /note="Nucleotide may be methylated to form 5-methylcytosine"
gtagtgtaaaggaccagaaagccactacggtagatgccacagatattaaatatccaacatcgcaagctgtgcttacaacagggagagcaacgtgcttctctgcctgatgctgatgcttcctg

SEQ ID NO: 4118 - DNA, 122 bp, Homo sapiens
  misc_feature (61)..(62): /note="This region represents a CpG dinucleotide"
  misc_feature (61)..(61): /note="Nucleotide may be methylated to form 5-methylcytosine"
aatagattgcatttgaccttgttggtttgatggacgggagtggagtccggccgcggacggcgtcccttccagggccggccgccagagggcgagcgcgccttcccgggcggggcggggacggg

SEQ ID NO: 4119 - DNA, 122 bp, Homo sapiens
  misc_feature (61)..(62): /note="This region represents a CpG dinucleotide"
  misc_feature (61)..(61): /note="Nucleotide may be methylated to form 5-methylcytosine"
gcacgcttcttgactccattttaaaccttttgttcacaccagggtggcattttttcacaccgcatgtggcagttttgactcctatccaacttgtcttataaaatcaaagtctgtgattttta

SEQ ID NO: 4120 - DNA, 122 bp, Homo sapiens
  misc_feature (61)..(62): /note="This region represents a CpG dinucleotide"
  misc_feature (61)..(61): /note="Nucleotide may be methylated to form 5-methylcytosine"
ctgcacagagtgaggagtgctggactatgagttgatgtgaatggatttggaaatggcccacgagaggcatccaacacaattagaaaccttgctccaggtgttgactgagatttaaatattaa

SEQ ID NO: 4121 - DNA, 122 bp, Homo sapiens
  misc_feature (61)..(62): /note="This region represents a CpG dinucleotide"
  misc_feature (61)..(61): /note="Nucleotide may be methylated to form 5-methylcytosine"
acctggggaagcagtttccttccccagtaaccgtaggtcatggtcagagcagggaaaacacgttctgtgagattttgtagttctgtctgctgacttcagaacaccacctccaccaccaccta

SEQ ID NO: 4122 - DNA, 122 bp, Homo sapiens
  misc_feature (61)..(62): /note="This region represents a CpG dinucleotide"
  misc_feature (61)..(61): /note="Nucleotide may be methylated to form 5-methylcytosine"
ggtcctcccctcacgtggatgtttgcgggtgctgatatgcccactgtgacactgcgttatcgccttgtgacttttgtctctgctcttgtctctcctccttagagtcagaggacatagggaga

SEQ ID NO: 4123 - DNA, 122 bp, Homo sapiens
  misc_feature (61)..(62): /note="This region represents a CpG dinucleotide"
  misc_feature (61)..(61): /note="Nucleotide may be methylated to form 5-methylcytosine"
tttgtcaattatctcatctgtgatatcctattacagtggcacaaaatggactgagacacccgtctataaaatagtctttaatatctttgatctcccagggttgtaatgatcatgtgaagcaa

SEQ ID NO: 4124 - DNA, 122 bp, Homo sapiens
  misc_feature (61)..(62): /note="This region represents a CpG dinucleotide"
  misc_feature (61)..(61): /note="Nucleotide may be methylated to form 5-methylcytosine"
aacagtgctaaaatacaatagtgggattacattcaccacggaatcaccagttacagccagcgtcgcctgaaatacattttccagcaaggaagctgcattttcaggaccttctctgttattca

SEQ ID NO: 4125 - DNA, 122 bp, Homo sapiens
  misc_feature (61)..(62): /note="This region represents a CpG dinucleotide"
  misc_feature (61)..(61): /note="Nucleotide may be methylated to form 5-methylcytosine"
tgctcactggcaggagagctgattcaccagtcgtacagtcactgcagaaaatatagtccacgtgtttaagcactaaagtttcttttccctcacaagagcacaacttcaagaggaaatgcatg

SEQ ID NO: 4126 - DNA, 122 bp, Homo sapiens
  misc_feature (61)..(62): /note="This region represents a CpG dinucleotide"
  misc_feature (61)..(61): /note="Nucleotide may be methylated to form 5-methylcytosine"
gcttgtgtaagctatgcagcttctggttctgtttacgtcatcatgcactttggcatttgccgcttatcacaaagtgttgttagtcttccacatacctaatatgtgctacatatttgtgcaag

SEQ ID NO: 4127 - DNA, 122 bp, Homo sapiens
  misc_feature (61)..(62): /note="This region represents a CpG dinucleotide"
  misc_feature (61)..(61): /note="Nucleotide may be methylated to form 5-methylcytosine"
gctttatcagggcagtcatcacgcccccagccgtctccagccccagggacaggggagccacgtccagcagcagcaggtcctgtaccttctcagacttgtcccccatcaggatggctgcttgt

SEQ ID NO: 4128 - DNA, 122 bp, Homo sapiens
  misc_feature (61)..(62): /note="This region represents a CpG dinucleotide"
  misc_feature (61)..(61): /note="Nucleotide may be methylated to form 5-methylcytosine"
ttgtccataaatacagcatattgaagcaacccaaactctatggcccaactttacaagtgacgaaaagtactctgtgtttagaagagattgttgagacatcactcgggtgtgctcaaagagtg

SEQ ID NO: 4129 - DNA, 122 bp, Homo sapiens
  misc_feature (61)..(62): /note="This region represents a CpG dinucleotide"
  misc_feature (61)..(61): /note="Nucleotide may be methylated to form 5-methylcytosine"
tgtcttggtctcacgccttccccagctcttcctgatgagctgccagtccacacctgcaagcgtccccaggccccacacagcaggtctgaccagcactggtccaggcccaggcccagggagtg

SEQ ID NO: 4130 - DNA, 122 bp, Homo sapiens
  misc_feature (61)..(62): /note="This region represents a CpG dinucleotide"
  misc_feature (61)..(61): /note="Nucleotide may be methylated to form 5-methylcytosine"
aaatggaaatagatctggtcagatcggtgcaggccaagcgggtgcctaacatgtgtttaccgacaacgacctagtacacgtttattaggaacattttctatttacataaagaggcagagaca

SEQ ID NO: 4131 - DNA, 122 bp, Homo sapiens
  misc_feature (61)..(62): /note="This region represents a CpG dinucleotide"
  misc_feature (61)..(61): /note="Nucleotide may be methylated to form 5-methylcytosine"
gttatctggccccaaaccgtcaatagaaatcttaatctaggacaaagactacaaacttaacgctgcttaatgaatgataaagtgaatatattttactgaatgaaactctgcccttaagtaag

SEQ ID NO: 4132 - DNA, 122 bp, Homo sapiens
  misc_feature (61)..(62): /note="This region represents a CpG dinucleotide"
  misc_feature (61)..(61): /note="Nucleotide may be methylated to form 5-methylcytosine"
gcgcgggggctgggctggcgggaggcgggccaatggaggctcgggggcggggccggcgggcggacgggcgggggtgcggagggggcggcggcggcggcggcgaacaaagaggcggcgggcgc

SEQ ID NO: 4133 - DNA, 122 bp, Homo sapiens
  misc_feature (61)..(62): /note="This region represents a CpG dinucleotide"
  misc_feature (61)..(61): /note="Nucleotide may be methylated to form 5-methylcytosine"
tgggtgcccatgtgacttgtatacacccaggtcataatcagtttagcataatgccagatacgtacatagcgggcatccgataaaatgaaggaagaaaagtacaggggaggggaagggaaagt

SEQ ID NO: 4134 - DNA, 122 bp, Homo sapiens
  misc_feature (61)..(62): /note="This region represents a CpG dinucleotide"
  misc_feature (61)..(61): /note="Nucleotide may be methylated to form 5-methylcytosine"
aaagaaaataaatcagaaggcaaatgttaatctctaaatgtctaaaaagctatcacctaccgcagaacatactgtatctctgttgctcagcactaacagcagcagcagaaacagcagaatgc

SEQ ID NO: 4135 - DNA, 122 bp, Homo sapiens
  misc_feature (61)..(62): /note="This region represents a CpG dinucleotide"
  misc_feature (61)..(61): /note="Nucleotide may be methylated to form 5-methylcytosine"
tttaatttgcatttctctgatgattaatgatgttgagtatgttttcttatgctggtttgccgcttgtatgtcttgttttgaaaatgtctgttcatgtcctttgcccactttttaatagagtt

SEQ ID NO: 4136 - DNA, 122 bp, Homo sapiens
  misc_feature (61)..(62): /note="This region represents a CpG dinucleotide"
  misc_feature (61)..(61): /note="Nucleotide may be methylated to form 5-methylcytosine"
gtgctactgtgggtggagctgaggctcccagggccctgcagcccagtgtggcctgatccccgcctggcctctccgcttttcctccacatactcacagctggcaaacaccagctatgaggcat

SEQ ID NO: 4137 - DNA, 122 bp, Homo sapiens
  misc_feature (61)..(62): /note="This region represents a CpG dinucleotide"
  misc_feature (61)..(61): /note="Nucleotide may be methylated to form 5-methylcytosine"
tagtatcacttccagaaatacttctaacactcattttgctacttacctagaattgagacacgtaagtgcagggtcaaacttcaaatcccagtatgaacctgtcctccagctccagcaccatt

SEQ ID NO: 4138 - DNA, 122 bp, Homo sapiens
  misc_feature (61)..(62): /note="This region represents a CpG dinucleotide"
  misc_feature (61)..(61): /note="Nucleotide may be methylated to form 5-methylcytosine"
cgcaccattaaataagcttctgaacctttgaacaaaaaccacaaacaaaaagcctgtgtgcgagaggttggcagggaaagaagggagtcaagtatggtgaggatgatcaaagaaagaaatga

SEQ ID NO: 4139 - DNA, 122 bp, Homo sapiens
  misc_feature (61)..(62): /note="This region represents a CpG dinucleotide"
  misc_feature (61)..(61): /note="Nucleotide may be methylated to form 5-methylcytosine"
aatcttaggtcttgaattttgtccagttcctacgtcatacctggctgtaagggctacagccgtaagcatgcttggtgactggaggctgtgtagtgagacctgagttttgaaaccaggattgg

SEQ ID NO: 4140 - DNA, 122 bp, Homo sapiens
  misc_feature (61)..(62): /note="This region represents a CpG dinucleotide"
  misc_feature (61)..(61): /note="Nucleotide may be methylated to form 5-methylcytosine"
aacaagtttgcctccttcatcgacaaggtgagcgggactggacctcgcctctcctcgagccgcgctccagaccacaccagccgccctaactagccctgcctgcgcgcgggccaggcgctggg

SEQ ID NO: 4141 - DNA, 122 bp, Homo sapiens
  misc_feature (61)..(62): /note="This region represents a CpG dinucleotide"
  misc_feature (61)..(61): /note="Nucleotide may be methylated to form 5-methylcytosine"
acagaaatctctacagaggccactacaaagattaccaagcccagtgtatgtcctcactgtcggaacaatactcattacagtttgcaaatttggacattaaagaaactgtatcatccttgagt

SEQ ID NO: 4142 - DNA, 122 bp, Homo sapiens
  misc_feature (61)..(62): /note="This region represents a CpG dinucleotide"
  misc_feature (61)..(61): /note="Nucleotide may be methylated to form 5-methylcytosine"
tatttaaaacaaatttccctaaatcctgagactgagacggagctacaaattctcagatggcgaccgtgtaaatggtattagcggctgaagaaaaaaaatttttcaagacctctgttttttaa

SEQ ID NO: 4143 - DNA, 122 bp, Homo sapiens
  misc_feature (61)..(62): /note="This region represents a CpG dinucleotide"
  misc_feature (61)..(61): /note="Nucleotide may be methylated to form 5-methylcytosine"
atgtatgtatatatatgtattatacacacacatatgcttttttcttttgaaggggaaaagcgatggctatcttccactgaagtattctggaggaagctgtgggaagaaaattggtggatttt

SEQ ID NO: 4144 - DNA, 122 bp, Homo sapiens
  misc_feature (61)..(62): /note="This region represents a CpG dinucleotide"
  misc_feature (61)..(61): /note="Nucleotide may be methylated to form 5-methylcytosine"
gatggaaatagtttctgagagattgccaggctgtcattttagtgtctgttgcataggacacgcgttacttgtagccaggttttttaactcgggtaaaacctgttaagttctgagctaataat

SEQ ID NO: 4145 - DNA, 122 bp, Homo sapiens
  misc_feature (61)..(62): /note="This region represents a CpG dinucleotide"
  misc_feature (61)..(61): /note="Nucleotide may be methylated to form 5-methylcytosine"
gctgtccaaaagccagagatccaacttgcaaacatttccatatgcccttgttcagttcttcggttgcagcttaaaccctgatttttgtaatattaaaatcattaaatagtcacaaatccatt

SEQ ID NO: 4146 - DNA, 122 bp, Homo sapiens
  misc_feature (61)..(62): /note="This region represents a CpG dinucleotide"
  misc_feature (61)..(61): /note="Nucleotide may be methylated to form 5-methylcytosine"
gggaagaggctgtgcttttcctctgagaaagatgacgttgcactttcatattgaggaaaccgcttgtggttggtggtggggactggtttttatttttatttttatttttttattttattttt

SEQ ID NO: 4147 - DNA, 122 bp, Homo sapiens
  misc_feature (61)..(62): /note="This region represents a CpG dinucleotide"
  misc_feature (61)..(61): /note="Nucleotide may be methylated to form 5-methylcytosine"
tacagtgtataaccttatgggacctcatgtggactcatcactgactgaaacattgttatgcggtgtgggactgtatttggctaaactagtaaggtatgctaatcatcccttatatttcctct

SEQ ID NO: 4148 - DNA, 122 bp, Homo sapiens
  misc_feature (61)..(62): /note="This region represents a CpG dinucleotide"
  misc_feature (61)..(61): /note="Nucleotide may be methylated to form 5-methylcytosine"
gggcagttccaggtgtgcacctgtagtctcatacttggtcccatcttcaactaaccacagcgagctgtgatatctctgccacctgactgagcatcttgaggcaaagattctcttgcttgact

SEQ ID NO: 4149 - DNA, 122 bp, Homo sapiens
  misc_feature (61)..(62): /note="This region represents a CpG dinucleotide"
  misc_feature (61)..(61): /note="Nucleotide may be methylated to form 5-methylcytosine"
aatggcagaaattgtttttcatttctacatctgcagtacctaacagagtgctaacaatctcgtgataataagagtttgaaaaataatgaacgaagtggtatatcttattaaaacctgaacta

SEQ ID NO: 4150 - DNA, 122 bp, Homo sapiens
  misc_feature (61)..(62): /note="This region represents a CpG dinucleotide"
  misc_feature (61)..(61): /note="Nucleotide may be methylated to form 5-methylcytosine"
aaccaactgagaactacaaatagagcaatgtttcctgtagggtccactgcatcgaggctacggcagagctcatgccttatgtccaggagatcatcagtgaaggcaatgaatgggtttttcag

SEQ ID NO: 4151 - DNA, 122 bp, Homo sapiens
  misc_feature (61)..(62): /note="This region represents a CpG dinucleotide"
  misc_feature (61)..(61): /note="Nucleotide may be methylated to form 5-methylcytosine"
agtttccataaaccccagatgataaatcttcttgtctttcttcccaactttcaaaaatggcgcttattactcaagaaaaaccacaacgctttgagctggcactagttagctcaattgaaggt

SEQ ID NO: 4152 - DNA, 122 bp, Homo sapiens
  misc_feature (61)..(62): /note="This region represents a CpG dinucleotide"
  misc_feature (61)..(61): /note="Nucleotide may be methylated to form 5-methylcytosine"
gtcattaagaaatgaaatgccttcctgcagaattttcacacagtcattaccatctgatagcgtttgatctttgagtcatggctgaagtgacccagattcaaactggcgattattaatgtcaa

SEQ ID NO: 4153 - DNA, 122 bp, Homo sapiens
  misc_feature (61)..(62): /note="This region represents a CpG dinucleotide"
  misc_feature (61)..(61): /note="Nucleotide may be methylated to form 5-methylcytosine"
gcgaaagaggaagattgagaaactcccccagactggaggagatttcagggacgtgaccaccgaacgcagtgcgagtccctgggctgaatccgggactaggaaatgacattcatgtgaaagcg

SEQ ID NO: 4154 - DNA, 122 bp, Homo sapiens
  misc_feature (61)..(62): /note="This region represents a CpG dinucleotide"
  misc_feature (61)..(61): /note="Nucleotide may be methylated to form 5-methylcytosine"
agaccgtaagccttccccactgtccctgggcacaatctgctggcgaatcctggaggtctgcgccggctgcccgtggggaggtggatagcatgagtgtgactgcagttgaatgtgtgtgtctc

SEQ ID NO: 4155 - DNA, 122 bp, Homo sapiens
  misc_feature (61)..(62): /note="This region represents a CpG dinucleotide"
  misc_feature (61)..(61): /note="Nucleotide may be methylated to form 5-methylcytosine"
agctgcggccgccgcgcactccccctctcccggagaaccccgagccgacgccgctgccgccgccgccgcgcactccccacccccgcccgcccaggtaacccaggaaaccgagaacaccaccc

SEQ ID NO: 4156 - DNA, 122 bp, Homo sapiens
  misc_feature (61)..(62): /note="This region represents a CpG dinucleotide"
  misc_feature (61)..(61): /note="Nucleotide may be methylated to form 5-methylcytosine"
accgccagtcagttccttcacgggctccattttcatgtacaggccagccttctgggcacacgtcacatggaatgctgtgtagcagtttgctttgtggcactggatgcaggcacccacgccct

SEQ ID NO: 4157 - DNA, 122 bp, Homo sapiens
  misc_feature (61)..(62): /note="This region represents a CpG dinucleotide"
  misc_feature (61)..(61): /note="Nucleotide may be methylated to form 5-methylcytosine"
acatgacctcaggcaaattacttaaatcctctgagcctcagttgcttcatctgaagaatgcgaccagacaggtggattttcaggcatgcaataaggtggcacaccttcaatcagagattctt

SEQ ID NO: 4158 - DNA, 122 bp, Homo sapiens
  misc_feature (61)..(62): /note="This region represents a CpG dinucleotide"
  misc_feature (61)..(61): /note="Nucleotide may be methylated to form 5-methylcytosine"
cataatgatgccattatgacagatcagcccaaggctgcacactgacctaatcaacaggtgcggcagagctgtgattaagagactgagtcagttcccacttgtgaatagacagcatgaaggct

SEQ ID NO: 4159 - DNA, 122 bp, Homo sapiens
  misc_feature (61)..(62): /note="This region represents a CpG dinucleotide"
  misc_feature (61)..(61): /note="Nucleotide may be methylated to form 5-methylcytosine"
ggaggtaattctccttagtacttcctgttcactaggtaatcagagccacaggcacataagcgcaagccatctcacaagtcagtcaatattgcaaaccatacataatagtatacttcatcagt

SEQ ID NO: 4160 - DNA, 122 bp, Homo sapiens
  misc_feature (61)..(62): /note="This region represents a CpG dinucleotide"
  misc_feature (61)..(61): /note="Nucleotide may be methylated to form 5-methylcytosine"
tctggaggctgggaagtccaagatcaaggtaccagctttggtgtctggtgcagacctactcgttgtgtcttgctgggggaagaaggctgtctgcacatggcagaaggtggaagaaagctaga

SEQ ID NO: 4161 - DNA, 122 bp, Homo sapiens
  misc_feature (61)..(62): /note="This region represents a CpG dinucleotide"
  misc_feature (61)..(61): /note="Nucleotide may be methylated to form 5-methylcytosine"
gtagcataatccattttaggaggagaggaggaggaaggttactgaagcccagaaaggtgacgttacttgttacacggacacacagccgttcaatggaagaacccatactcaacaggaatggc

SEQ ID NO: 4162 - DNA, 122 bp, Homo sapiens
  misc_feature (61)..(62): /note="This region represents a CpG dinucleotide"
  misc_feature (61)..(61): /note="Nucleotide may be methylated to form 5-methylcytosine"
caaaacaacacatgaagacaggtcctcaaccttgttgtccttaagttatagatgagaaaacggaagagtctagagaggctgaggacctcgcctaagctcacacagttaacaagggccagagc

SEQ ID NO: 4163 - DNA, 122 bp, Homo sapiens
  misc_feature (61)..(62): /note="This region represents a CpG dinucleotide"
  misc_feature (61)..(61): /note="Nucleotide may be methylated to form 5-methylcytosine"
gctcttccaactcccagctaccctgtggaacacccctgttggagccgatgtcttttctggcgtagccagatcccagaaagcaacggcttcctctgcgaacaaatatggtctcttctcagaaa

SEQ ID NO: 4164 - DNA, 122 bp, Homo sapiens
  misc_feature (61)..(62): /note="This region represents a CpG dinucleotide"
  misc_feature (61)..(61): /note="Nucleotide may be methylated to form 5-methylcytosine"
cttatctcactacatgaaccactgctgtgggatttggggtctggttagggaagattaaagcggtgggtggtgcagcattctttgcttaaaacctaaaatacaactccttctgcattaaatac

SEQ ID NO: 4165 - DNA, 122 bp, Homo sapiens
  misc_feature (61)..(62): /note="This region represents a CpG dinucleotide"
  misc_feature (61)..(61): /note="Nucleotide may be methylated to form 5-methylcytosine"
atttagaatacaaatctgctctattgaacgaatgtaacaagcaaggaggcttaagactggcgcaggcaagagcactcatcaagatagatgtgaacaaaacccggaaaatctatgatttcctc

SEQ ID NO: 4166 - DNA, 122 bp, Homo sapiens
  misc_feature (61)..(62): /note="This region represents a CpG dinucleotide"
  misc_feature (61)..(61): /note="Nucleotide may be methylated to form 5-methylcytosine"
atgagcatccctctataaacccttgacttggcaaataaccgagctgttctggttcaatagcgccacctagcatccagacatagaactctatgacctaatattaacccattaccttctccctt

SEQ ID NO: 4167 - DNA, 122 bp, Homo sapiens
  misc_feature (61)..(62): /note="This region represents a CpG dinucleotide"
  misc_feature (61)..(61): /note="Nucleotide may be methylated to form 5-methylcytosine"
gaatttgaggccagccagcttggatttgcatcctatcttcaccacttcctaactatgacccgggacaagttatataacctctctaaagcatcagtgcttttatctataagacagggatatac

SEQ ID NO: 4168 - DNA, 122 bp, Homo sapiens
  misc_feature (61)..(62): /note="This region represents a CpG dinucleotide"
  misc_feature (61)..(61): /note="Nucleotide may be methylated to form 5-methylcytosine"
agtaagagccttccataccgaaagaattctgagtggttcttgacctgggctgcagtctagcgtcaccacgtaaaagggagtatatggagcacctggacatatcatgcatgactggtgggagt

SEQ ID NO: 4169 - DNA, 122 bp, Homo sapiens
  misc_feature (61)..(62): /note="This region represents a CpG dinucleotide"
  misc_feature (61)..(61): /note="Nucleotide may be methylated to form 5-methylcytosine"
cctcgtctccaagagaaatacaactgacatcagtaatttacccaaatactctacaggtaacgtgtgccaaatacaaacctgcactaaattagggccagaactctcctctgtgcattctgcct

SEQ ID NO: 4170 - DNA, 122 bp, Homo sapiens
  misc_feature (61)..(62): /note="This region represents a CpG dinucleotide"
  misc_feature (61)..(61): /note="Nucleotide may be methylated to form 5-methylcytosine"
cagggccatttgtcctccagtttacttgatgccaaatttctcctgtgagcaggttgtactcgtaaaacaaggatcatcgatgttgtctacaatgcatctaataacgagctggttcgtaccaa

SEQ ID NO: 4171 - DNA, 122 bp, Homo sapiens
  misc_feature (61)..(62): /note="This region represents a CpG dinucleotide"
  misc_feature (61)..(61): /note="Nucleotide may be methylated to form 5-methylcytosine"
cccctgaccgccctttctgcccttgccactggccaagccactatctatctccttccccagcgctgaccattcagactatgagaacattccaaccatgaactcagactatgagaatatccaga

SEQ ID NO: 4172 - DNA, 122 bp, Homo sapiens
  misc_feature (61)..(62): /note="This region represents a CpG dinucleotide"
  misc_feature (61)..(61): /note="Nucleotide may be methylated to form 5-methylcytosine"
cagtttataacactagcataaccataaaactattaacagtaattcctgacaaatacccatcgttcaaattcctaatggtccaataagtgtcatatataaattgtgccaattgtccaaatata

SEQ ID NO: 4173 - DNA, 122 bp, Homo sapiens
  misc_feature (61)..(62): /note="This region represents a CpG dinucleotide"
  misc_feature (61)..(61): /note="Nucleotide may be methylated to form 5-methylcytosine"
agactggctatctccaggccagcagggaggaccccgctgtgtggtcacggctcacactgccgggccctgtgaacacacccgttcccgacagggcctggatccagggcagagtgcaaagctgg

SEQ ID NO: 4174 - DNA, 122 bp, Homo sapiens
  misc_feature (61)..(62): /note="This region represents a CpG dinucleotide"
  misc_feature (61)..(61): /note="Nucleotide may be methylated to form 5-methylcytosine"
tctgcatttctcaccagctcctgggtgatagcgatactgctttgagtagcaaggatgtagcggactctgaagccagacagcctggtttaagtcctgcctctgctatttactagctgtgtaaa

SEQ ID NO: 4175 - DNA, 122 bp, Homo sapiens
  misc_feature (61)..(62): /note="This region represents a CpG dinucleotide"
  misc_feature (61)..(61): /note="Nucleotide may be methylated to form 5-methylcytosine"
agtcccaaagcatttttatcaccaccaaagtaatcttgtacctgttaatcagtagctgcccgtattaccttcaacccagccccagaacaccaatctgtgtcctgtctctgtggacttaccta

SEQ ID NO: 4176 - DNA, 122 bp, Homo sapiens
  misc_feature (61)..(62): /note="This region represents a CpG dinucleotide"
  misc_feature (61)..(61): /note="Nucleotide may be methylated to form 5-methylcytosine"
aatccaaaggtaggtctctagtgagggacagtagggctctagtcattccatcgatgtgatcgctgggcaaagggagggtggaggaccttgggctgacctcagggatggtgccagagagaacg

SEQ ID NO: 4177 - DNA, 122 bp, Homo sapiens
  misc_feature (61)..(62): /note="This region represents a CpG dinucleotide"
  misc_feature (61)..(61): /note="Nucleotide may be methylated to form 5-methylcytosine"
tcttcatgctcctccagggcaaactacaccctccttggcaggagcagggagcaagctgagcggtcaaggcagctaaacctgccagccacacagaccagctcacaggactggagagtaatggt

SEQ ID NO: 4178 - DNA, 122 bp, Homo sapiens
  misc_feature (61)..(62): /note="This region represents a CpG dinucleotide"
  misc_feature (61)..(61): /note="Nucleotide may be methylated to form 5-methylcytosine"
actaactatctgcatggcagggcaaggtccttaacttcattaaacctccggttccttattcgtaaaatgaagacaataatggcacccattgggaggacttaaaaagctaatactgtgtatag

SEQ ID NO: 4179 - DNA, 122 bp, Homo sapiens
  misc_feature (61)..(62): /note="This region represents a CpG dinucleotide"
  misc_feature (61)..(61): /note="Nucleotide may be methylated to form 5-methylcytosine"
gggaggagtttagctacatccaagtagggacttatagaaatatgcccctggaaggccgggcgcggtggctcacgcctgtaatcccagcactttgggaggccgacgcgggtggttcactaggt

SEQ ID NO: 4180 - DNA, 122 bp, Homo sapiens
  misc_feature (61)..(62): /note="This region represents a CpG dinucleotide"
  misc_feature (61)..(61): /note="Nucleotide may be methylated to form 5-methylcytosine"
agatgacactgccaacagtctttgctcctctgtggagctggccaagattgtttctgtcttcgtactgcttaacagactagggtcaggtgccaagaggttgcctgtcctgaaagcttcttttc

SEQ ID NO: 4181 - DNA, 122 bp, Homo sapiens
  misc_feature (61)..(62): /note="This region represents a CpG dinucleotide"
  misc_feature (61)..(61): /note="Nucleotide may be methylated to form 5-methylcytosine"
ctctagcaacaatcagtaacataactgccaatggtagaaagttatagctgctcacacatgcgtaaaacaaattttcctttcaggctggccttggtatgttacaggaataacccaatgggggt

SEQ ID NO: 4182 - DNA, 122 bp, Homo sapiens
  misc_feature (61)..(62): /note="This region represents a CpG dinucleotide"
  misc_feature (61)..(61): /note="Nucleotide may be methylated to form 5-methylcytosine"
gggggtctccttgatttcgcttaagtgtggacctggtgcgcagcctacaccgccgaggaccgactattgtgaagccactttgggagcgggtcggagtggcggcagggggtgggggaagggat

SEQ ID NO: 4183 - DNA, 122 bp, Homo sapiens
  misc_feature (61)..(62): /note="This region represents a CpG dinucleotide"
  misc_feature (61)..(61): /note="Nucleotide may be methylated to form 5-methylcytosine"
tggaagcttggctctaactctgtgcaagaccattccatgttagcgcttgaggcaggcaggcgcctgtcatctcattggcacaaagggccttggatcaagagagagcagaattagaaaacacc

SEQ ID NO: 4184 - DNA, 122 bp, Homo sapiens
  misc_feature (61)..(62): /note="This region represents a CpG dinucleotide"
  misc_feature (61)..(61): /note="Nucleotide may be methylated to form 5-methylcytosine"
ttataaagaacaaaaacagaagcagaaggcgcttcattcctctctttcttcagctgaagccggttctgttagcacagaatttagaaaataatagtgagacgtggcatgaattggcttgtatc

SEQ ID NO: 4185 - DNA, 122 bp, Homo sapiens
  misc_feature (61)..(62): /note="This region represents a CpG dinucleotide"
  misc_feature (61)..(61): /note="Nucleotide may be methylated to form 5-methylcytosine"
actacagttctctaaggcatctagacagtagttcctcaacaggtgctattttatcgaccccgtacttttaatgaacatatcaattcaatgaactttgcacgcctgctatgggccataccgtg

SEQ ID NO: 4186 - DNA, 122 bp, Homo sapiens
  misc_feature (61)..(62): /note="This region represents a CpG dinucleotide"
  misc_feature (61)..(61): /note="Nucleotide may be methylated to form 5-methylcytosine"
catatgtgcagcatcagcaaggtataccttttacagacaatagtggctctgagccaaacacgagctcatgtgagttgttacctaatgtgcctcatgtggtgtggttacataacgagcaaggt

SEQ ID NO: 4187 - DNA, 122 bp, Homo sapiens
  misc_feature (61)..(62): /note="This region represents a CpG dinucleotide"
  misc_feature (61)..(61): /note="Nucleotide may be methylated to form 5-methylcytosine"
tacaggcctgagccactgagcctggcctgatttcagaacatttaaagatgcttctgtaatcgctccctcaaattaaactatgtgaaaagaccacttgtggaggcttcacaggtcaccacctg

SEQ ID NO: 4188 - DNA, 122 bp, Homo sapiens
  misc_feature (61)..(62): /note="This region represents a CpG dinucleotide"
  misc_feature (61)..(61): /note="Nucleotide may be methylated to form 5-methylcytosine"
gttcagcaagtactggcagcacttaacacgtgcagtaaagcagtgaggctgttttgccaccgtgacaatgcagttgagttttgcctaacgtgaaaatactaagtttctgtgtattctctgct

SEQ ID NO: 4189 - DNA, 122 bp, Homo sapiens
  misc_feature (61)..(62): /note="This region represents a CpG dinucleotide"
  misc_feature (61)..(61): /note="Nucleotide may be methylated to form 5-methylcytosine"
atcccatcatgacagcctgctgttactcacagctggcagatactgtaaactgtgttgccacgtcagctgcccagaacctttctgcttcagcagcagtttcccatcggaatggcttaataggc

SEQ ID NO: 4190 - DNA, 122 bp, Homo sapiens
  misc_feature (61)..(62): /note="This region represents a CpG dinucleotide"
  misc_feature (61)..(61): /note="Nucleotide may be methylated to form 5-methylcytosine"
cagtggcctactttctgcttgtgagcctgttattcctgctggtcttgtgcagagcagccccggaacacagcggcattcttgacagagggcagttggcagctaccagtgcctgtctactttcg

SEQ ID NO: 4191 - DNA, 122 bp, Homo sapiens
  misc_feature (61)..(62): /note="This region represents a CpG dinucleotide"
  misc_feature (61)..(61): /note="Nucleotide may be methylated to form 5-methylcytosine"
tggatttggaaagctgcccagagcagatttcggataaagttttccaggatgagcactcagcgttgctagggaaactgaaaggcgggtggatggtgaatggaggtgaagggggtgggggactg

SEQ ID NO: 4192 - DNA, 122 bp, Homo sapiens
  misc_feature (61)..(62): /note="This region represents a CpG dinucleotide"
  misc_feature (61)..(61): /note="Nucleotide may be methylated to form 5-methylcytosine"
agttccttgtactctgcatcttccaacatacttgatggattattatccccataaagtgcccgtaaaagaaagcagcacaagagagttggcttatttaggattctatcaaccagctgttacat

SEQ ID NO: 4193 - DNA, 122 bp, Homo sapiens
  misc_feature (61)..(62): /note="This region represents a CpG dinucleotide"
  misc_feature (61)..(61): /note="Nucleotide may be methylated to form 5-methylcytosine"
cacaggtacattttatagactagaagtgcctgtatttcttctgtttaggtctaacagatacgtagagatatggagataaactaaacagccactctggctgggtttgttttaccaaacaaaca

SEQ ID NO: 4194 - DNA, 122 bp, Homo sapiens
  misc_feature (61)..(62): /note="This region represents a CpG dinucleotide"
  misc_feature (61)..(61): /note="Nucleotide may be methylated to form 5-methylcytosine"
tggctctgcccactaccaccttttcccagcatggaaatgaggtacacacgaaagctttatcgtgttggtatcaatgtattccaagtactcaactattttataagccttttcaagtaatcttc

SEQ ID NO: 4195 - DNA, 122 bp, Homo sapiens
  misc_feature (61)..(62): /note="This region represents a CpG dinucleotide"
  misc_feature (61)..(61): /note="Nucleotide may be methylated to form 5-methylcytosine"
ttgtggcacctagcccgcgcacttcggcagcccagatggagctcatctcagacaaccaagcggaaaagaggggaagccagaaagagatggagacccaacattgtggccaatgaacccgcgaa

SEQ ID NO: 4196 - DNA, 122 bp, Homo sapiens
  misc_feature (61)..(62): /note="This region represents a CpG dinucleotide"
  misc_feature (61)..(61): /note="Nucleotide may be methylated to form 5-methylcytosine"
ttttacccatgtgccatgcttcctgcattgtttaaatatggtcattcaggactttttctgcgagcacaaaagcattgagaatatgttagtggctgccaggaaaacttgtcatcattttagtc

SEQ ID NO: 4197 - DNA, 122 bp, Homo sapiens
  misc_feature (61)..(62): /note="This region represents a CpG dinucleotide"
  misc_feature (61)..(61): /note="Nucleotide may be methylated to form 5-methylcytosine"
gagtatttataagctcataaagcttgttacagccttaagcaaaaagcttggggccaagggcgttttaaaaaatgcacactttatgaggtgcaactgcggagaaatgaggacgcgttcttaag

SEQ ID NO: 4198 - DNA, 122 bp, Homo sapiens
  misc_feature (61)..(62): /note="This region represents a CpG dinucleotide"
  misc_feature (61)..(61): /note="Nucleotide may be methylated to form 5-methylcytosine"
gaaaatggaagggaaataggctgacacctgcttggggctatttgtgcggcccctggtgcccgtgctggctgtgcccgcccgtggctgggttggtgtggctgtgtgccccccggtgcccctgt

SEQ ID NO: 4199 - DNA, 122 bp, Homo sapiens
  misc_feature (61)..(62): /note="This region represents a CpG dinucleotide"
  misc_feature (61)..(61): /note="Nucleotide may be methylated to form 5-methylcytosine"
gcagagtctgggggaacaggggctgggcctcggggtctctatccctgcttttctcgcctccgcttcccacctcccttgccctcttaggtacaggctggttgatgggtcgaggtgttcctcgt

SEQ ID NO: 4200 - DNA, 122 bp, Homo sapiens
  misc_feature (61)..(62): /note="This region represents a CpG dinucleotide"
  misc_feature (61)..(61): /note="Nucleotide may be methylated to form 5-methylcytosine"
aagtctcatacttgttcttccaaaatcagttctatgagttgctttaaaattagcctgggacgtccaagaagtgttaagacatctgcagtaactggggcagccagtccctggaggccaactca

SEQ ID NO: 4201 - DNA, 122 bp, Homo sapiens
  misc_feature (61)..(62): /note="This region represents a CpG dinucleotide"
  misc_feature (61)..(61): /note="Nucleotide may be methylated to form 5-methylcytosine"
atggtaaaaaaaaaaagtacagctgttaaagcggccttggagttgccctgacaaacacaccgtcactttaagaaataagactatagctcaaataaccagttatcaggaggtaactggatctt

SEQ ID NO: 4202 - DNA, 122 bp, Homo sapiens
  misc_feature (61)..(62): /note="This region represents a CpG dinucleotide"
  misc_feature (61)..(61): /note="Nucleotide may be methylated to form 5-methylcytosine"
agatctgcccttcttgggctccctgtgaagctgctgtacaactacaccctcaggagtcctcgaagcattgctgtctagctgagaggtgctaggagtcatgccctttagattcttagcccttt

SEQ ID NO: 4203 - DNA, 122 bp, Homo sapiens
  misc_feature (61)..(62): /note="This region represents a CpG dinucleotide"
  misc_feature (61)..(61): /note="Nucleotide may be methylated to form 5-methylcytosine"
gaggtgctcagcggcgccaggaacagtagctgctcgtacttggcgcgaatccacgactcgcgctcctccctgcaagaccagggatcaacggaaaaggctctagggacccccagccaggactt

SEQ ID NO: 4204 - DNA, 122 bp, Homo sapiens
  misc_feature (61)..(62): /note="This region represents a CpG dinucleotide"
  misc_feature (61)..(61): /note="Nucleotide may be methylated to form 5-methylcytosine"
tccccacctcacgccggcggggccaccctttcactccgcctccatctgctctgtggtccgcgctcgctcctgaagttaggcgtatacaccaccttccaactgggacagaagatatcagtctc

SEQ ID NO: 4205 - DNA, 122 bp, Homo sapiens
  misc_feature (61)..(62): /note="This region represents a CpG dinucleotide"
  misc_feature (61)..(61): /note="Nucleotide may be methylated to form 5-methylcytosine"
attggcagaaggaaagcattcttgcacagaggtgaatggccatgtgaggcaatagtgaggcggtatgagtgctattagtaatacaggctgagtatctcttacctgaagtgtttggtactaga

SEQ ID NO: 4206 - DNA, 122 bp, Homo sapiens
  misc_feature (61)..(62): /note="This region represents a CpG dinucleotide"
  misc_feature (61)..(61): /note="Nucleotide may be methylated to form 5-methylcytosine"
aattctggaagaaactcaagcagcatggaatgttttctcgccattcagaaacagtgcctacgttcatacatgtaaattggatctgccattctgtctcaccactggattttacctcgggtgcc

SEQ ID NO: 4207 - DNA, 122 bp, Homo sapiens
  misc_feature (61)..(62): /note="This region represents a CpG dinucleotide"
  misc_feature (61)..(61): /note="Nucleotide may be methylated to form 5-methylcytosine"
tagcatccctgtgatgaaacttgagggctgtttctgcagtaggtgcgacacttgttgacacgacacgctggggaggccctggcaagggggcctggtgaaatgcagccccagggagctgatga

SEQ ID NO: 4208 - DNA, 122 bp, Homo sapiens
  misc_feature (61)..(62): /note="This region represents a CpG dinucleotide"
  misc_feature (61)..(61): /note="Nucleotide may be methylated to form 5-methylcytosine"
ggtgggcatacaccctatctagttcggggtcaacccttcagcaaagggtcagtagttgtccgtgaattgcagaagcttcccaagggatccggagcacagatttgcagggcagcccagggcac

SEQ ID NO: 4209 - DNA, 122 bp, Homo sapiens
  misc_feature (61)..(62): /note="This region represents a CpG dinucleotide"
  misc_feature (61)..(61): /note="Nucleotide may be methylated to form 5-methylcytosine"
acaagatatttgctgatcttgtttttcttttaataaaggaatgtgaccttttaacttgtgcgtcaaaagtagttatgtcagtcggctatgatagtcgtaaatgtaggtctttggtacttctt

SEQ ID NO: 4210 - DNA, 122 bp, Homo sapiens
  misc_feature (61)..(62): /note="This region represents a CpG dinucleotide"
  misc_feature (61)..(61): /note="Nucleotide may be methylated to form 5-methylcytosine"
atatatatatatatatatatacacacatacatacatacacacacacacacttaatatatacgcataaaaattaaaattaaaaacaaagtgttacagctcttttagaatttgtctagcaggat

SEQ ID NO: 4211 - DNA, 122 bp, Homo sapiens
  misc_feature (61)..(62): /note="This region represents a CpG dinucleotide"
  misc_feature (61)..(61): /note="Nucleotide may be methylated to form 5-methylcytosine"
ggagatttgaagactggcctctaactcttgaaagttggcatgctaccactataaaaatgccgtttttgaactaaaaagcaaagacctaaatgactcctggtcttacgattcaggcaggaaac

SEQ ID NO: 4212 - DNA, 122 bp, Homo sapiens
  misc_feature (61)..(62): /note="This region represents a CpG dinucleotide"
  misc_feature (61)..(61): /note="Nucleotide may be methylated to form 5-methylcytosine"
ttcattttaaaacatttttattatcctctaaaagcaatcctgcttcccttggctcttactcgtatcttacccaaccttcagcaactgctagtctactttctatcacttagagatttgcctct

SEQ ID NO: 4213 - DNA, 122 bp, Homo sapiens
  misc_feature (61)..(62): /note="This region represents a CpG dinucleotide"
  misc_feature (61)..(61): /note="Nucleotide may be methylated to form 5-methylcytosine"
tcaactgagtcgttccataatgtgagcaagtcatttactctcccaaagcctcagtttcttcgtctacaaaatagaggtagctaatacctaccctctcactacctcaaagggttgctgggaag

SEQ ID NO: 4214 - DNA, 122 bp, Homo sapiens
  misc_feature (61)..(62): /note="This region represents a CpG dinucleotide"
  misc_feature (61)..(61): /note="Nucleotide may be methylated to form 5-methylcytosine"
taattctctttggcttaattttaatgccacagacttatctgtgcattccctttgttctatcgtggcttagttctaaggtgagaagaagaatctaggtaaggattgactaaagaaaatgacac

SEQ ID NO: 4215 - DNA, 122 bp, Homo sapiens
  misc_feature (61)..(62): /note="This region represents a CpG dinucleotide"
  misc_feature (61)..(61): /note="Nucleotide may be methylated to form 5-methylcytosine"
gaggaacatgccatggctagcctgatagtccaagaaggacgtgaggcatgtagaataaagcggtttcagctcacctgcagatctgcaatgagaagcaaagtggcctagctgtgctcagctta

SEQ ID NO: 4216 - DNA, 122 bp, Homo sapiens
  misc_feature (61)..(62): /note="This region represents a CpG dinucleotide"
  misc_feature (61)..(61): /note="Nucleotide may be methylated to form 5-methylcytosine"
atagatctaataagtaagtctttagtgtatatctccacccacatcttaacctgtaggcttcgaacagttgtaagaaaatgcttagcaacataaataatgagactgtaaaaatgtgaacagaa

SEQ ID NO: 4217 - DNA, 122 bp, Homo sapiens
  misc_feature (61)..(62): /note="This region represents a CpG dinucleotide"
  misc_feature (61)..(61): /note="Nucleotide may be methylated to form 5-methylcytosine"
atatctgctttggaagcaaatgatggaaagttttgtccaggttgccttccctcacttttgcgcgtgggtgtgagtttgtgtacccgattctactgtgaggagttcaggttgctttacctgct

SEQ ID NO: 4218 - DNA, 122 bp, Homo sapiens
  misc_feature (61)..(62): /note="This region represents a CpG dinucleotide"
  misc_feature (61)..(61): /note="Nucleotide may be methylated to form 5-methylcytosine"
ccctaagtgcacatgatatcatcacttttcttccccatcagtgtgcctcatattttccttcgggcaaatctgaaatctactggagtttttcctcatggacagctcaatcttatggacagaag

SEQ ID NO: 4219 - DNA, 122 bp, Homo sapiens
  misc_feature (61)..(62): /note="This region represents a CpG dinucleotide"
  misc_feature (61)..(61): /note="Nucleotide may be methylated to form 5-methylcytosine"
gctttcgggagctggaactcacatcgcttctgcgccgctgcaacatgcctggatgctctgcgctgtgggcgctggctcatcgcccctctgattcacaccgttattaaaccagcactcgggca

SEQ ID NO: 4220 - DNA, 122 bp, Homo sapiens
  misc_feature (61)..(62): /note="This region represents a CpG dinucleotide"
  misc_feature (61)..(61): /note="Nucleotide may be methylated to form 5-methylcytosine"
cttacagccctccatgattttgaacaagtataaaataaaattcttcattggtggaatgtacgagtatagtcttgtttactctgcgcaaaactcaaaagccagacgtgggggtgggtgtaaaa

SEQ ID NO: 4221 - DNA, 122 bp, Homo sapiens
  misc_feature (61)..(62): /note="This region represents a CpG dinucleotide"
  misc_feature (61)..(61): /note="Nucleotide may be methylated to form 5-methylcytosine"
caagctttgtaaattactccaactaagccttttgctgctccgtatgtattctatcaccaccgcttgcagcacatccttacagattccacttcagattgtacttagtgttttctcagctttga

SEQ ID NO: 4222 - DNA, 122 bp, Homo sapiens
  misc_feature (61)..(62): /note="This region represents a CpG dinucleotide"
  misc_feature (61)..(61): /note="Nucleotide may be methylated to form 5-methylcytosine"
agaatgccagccagggagcacatacctttctaattgagtaataggctaagaggacctgtgcggagctgaagacagacgcctcaaatcgcgggggcacagggagagcggtcagatgtcctgca

SEQ ID NO: 4223 - DNA, 122 bp, Homo sapiens
  misc_feature (61)..(62): /note="This region represents a CpG dinucleotide"
  misc_feature (61)..(61): /note="Nucleotide may be methylated to form 5-methylcytosine"
aggagtggttacagtaggtagggtcttttgaatatcatctcatggcctcattctcaccagcgcaggttttcctgactatcctcatattagcacagagcaccttacctccatcatagcctcat

SEQ ID NO: 4224 - DNA, 122 bp, Homo sapiens
  misc_feature (61)..(62): /note="This region represents a CpG dinucleotide"
  misc_feature (61)..(61): /note="Nucleotide may be methylated to form 5-methylcytosine"
tcagatgttctgaacacctcactgaatgaaatgtctaaccatgatgtttccaggaaatgccgcctctacaagtcactgggcagcctgataaacatttgcatgtgccctgaggtcaagtgacc

SEQ ID NO: 4225 - DNA, 122 bp, Homo sapiens
  misc_feature (61)..(62): /note="This region represents a CpG dinucleotide"
  misc_feature (61)..(61): /note="Nucleotide may be methylated to form 5-methylcytosine"
aagctctggttaacgtaaccctcaggacagctcaagaaattcttgcactgtgctttcccacgtacatttcagtgtacaggctgtgtacctgtggctgtttatcaggttcatcttctttagca

SEQ ID NO: 4226 - DNA, 122 bp, Homo sapiens
  misc_feature (61)..(62): /note="This region represents a CpG dinucleotide"
  misc_feature (61)..(61): /note="Nucleotide may be methylated to form 5-methylcytosine"
ctaagacatgtcacaaaataatatttgctgcctttgttccttgctctggtaacatcttcccgctgaacgtatttcctgacttaaagagtttaaaagacagtcgtataatctaactctggcta

SEQ ID NO: 4227 - DNA, 122 bp, Homo sapiens
  misc_feature (61)..(62): /note="This region represents a CpG dinucleotide"
  misc_feature (61)..(61): /note="Nucleotide may be methylated to form 5-methylcytosine"
accatctttggcaatgaatctttaacaaaagatcaagaacttgacatttatttttaagcacgagaagaaaatgtgtgcaatgttggaagcaaggacagggataggaagagcttctaaacagt

SEQ ID NO: 4228 - DNA, 122 bp, Homo sapiens
  misc_feature (61)..(62): /note="This region represents a CpG dinucleotide"
  misc_feature (61)..(61): /note="Nucleotide may be methylated to form 5-methylcytosine"
gtgacattactggtgcataatctaacttatcctgactaatacagccaccttacacaataacgcatttaactttctcagataaagtcaagtaatggagaaggaagttccagagctagttgaca

SEQ ID NO: 4229 - DNA, 122 bp, Homo sapiens
  misc_feature (61)..(62): /note="This region represents a CpG dinucleotide"
  misc_feature (61)..(61): /note="Nucleotide may be methylated to form 5-methylcytosine"
atgaagtggccgctagagttgagaacagccctcatctgacagccagcaaggagacagggacgttcatcctgaaaatgcaagggactgatttttgccaagagtctggatgaacaagaaaacag

SEQ ID NO: 4230 - DNA, 122 bp, Homo sapiens
  misc_feature (61)..(62): /note="This region represents a CpG dinucleotide"
  misc_feature (61)..(61): /note="Nucleotide may be methylated to form 5-methylcytosine"
ggaatccagctaaccacctgtattgttaccaggtgttctgaagtgacaatgcaatctgttcgccagatataaaaggacaatcagagaggaagaacttgtcagcatttgtccagccctgctgg

SEQ ID NO: 4231 - DNA, 122 bp, Homo sapiens
  misc_feature (61)..(62): /note="This region represents a CpG dinucleotide"
  misc_feature (61)..(61): /note="Nucleotide may be methylated to form 5-methylcytosine"
tgagccaactgaattaccaagtaatgggggccccatggcatcccatgacaggtggagagccggctcttcaccctggatggacctgaaatgcctgctaaggccttgctccaccgagtagcaca

SEQ ID NO: 4232 - DNA, 122 bp, Homo sapiens
  misc_feature (61)..(62): /note="This region represents a CpG dinucleotide"
  misc_feature (61)..(61): /note="Nucleotide may be methylated to form 5-methylcytosine"
atttgcacatattaagtaaaggtgagtgccttctccataggaacctataccaaataacagcgctggaagtgaaagtaagcggactggcatttatgatctgtccttacacagttgtctctgtc

SEQ ID NO: 4233 - DNA, 122 bp, Homo sapiens
  misc_feature (61)..(62): /note="This region represents a CpG dinucleotide"
  misc_feature (61)..(61): /note="Nucleotide may be methylated to form 5-methylcytosine"
gtgaatttacatattaataagaaacacatttaaaccttgccctgccacagaattattttgcgggggggggggggggggggaagatgtactttttgaatatgtgtacatcaaaaccaaaaagt

SEQ ID NO: 4234 - DNA, 122 bp, Homo sapiens
  misc_feature (61)..(62): /note="This region represents a CpG dinucleotide"
  misc_feature (61)..(61): /note="Nucleotide may be methylated to form 5-methylcytosine"
gggtaacatggataaacctcatttctatgaaaaacacaaaaaactagccaaagggccgggcgtggtggctcatacccgtaatcccagcactttagggggccgaggtgggcggatcacgaggt

SEQ ID NO: 4235 - DNA, 122 bp, Homo sapiens
  misc_feature (61)..(62): /note="This region represents a CpG dinucleotide"
  misc_feature (61)..(61): /note="Nucleotide may be methylated to form 5-methylcytosine"
tcactagttccaccaacacccctacaccctgaagtggaagttctaatcacaggttcgacacgaggccaagcaaattagctcggtagtacagacccaaaagtcaggtcaggagaacagcaatt

SEQ ID NO: 4236 - DNA, 122 bp, Homo sapiens
  misc_feature (61)..(62): /note="This region represents a CpG dinucleotide"
  misc_feature (61)..(61): /note="Nucleotide may be methylated to form 5-methylcytosine"
aggccacgctctgtgggaaagcacggggcatgcaaactcgaaatgaaagcccgggaacgccggaacaagcacaggtgtaagatttcccttttaaaacgtggagaataagaaatcagcccgag

SEQ ID NO: 4237 - DNA, 122 bp, Homo sapiens
  misc_feature (61)..(62): /note="This region represents a CpG dinucleotide"
  misc_feature (61)..(61): /note="Nucleotide may be methylated to form 5-methylcytosine"
cactagactaaaaaatgaccaaagtgacactaatgtatgaaaatcaatccaaaggttgaacggcactgctgaagaaaaggcttaaaggtattgcggcatcttgttatattctttactagatt

SEQ ID NO: 4238 - DNA, 122 bp, Homo sapiens
  misc_feature (61)..(62): /note="This region represents a CpG dinucleotide"
  misc_feature (61)..(61): /note="Nucleotide may be methylated to form 5-methylcytosine"
taagaggaagccaggggtgtctgtctggttctgggccttcccagacaaaagccagagacccggagcctctttctgagaaggaaccgggcgtccccaagatttcctctagccgagtcccctgg

SEQ ID NO: 4239 - DNA, 122 bp, Homo sapiens
  misc_feature (61)..(62): /note="This region represents a CpG dinucleotide"
  misc_feature (61)..(61): /note="Nucleotide may be methylated to form 5-methylcytosine"
ttccaagccatggtttcggcatctgatcaatgcggatcctgatatgcaccgtcagagatacgatgggactggtcagcactgggactggtctggtgagtatttaatagagtgctcagcacatg

SEQ ID NO: 4240 - DNA, 122 bp, Homo sapiens
  misc_feature (61)..(62): /note="This region represents a CpG dinucleotide"
  misc_feature (61)..(61): /note="Nucleotide may be methylated to form 5-methylcytosine"
ggtggcctagattgacttagccaactctgctttctataatagttggtgccaaaatgcagtcgtcttttgggctttacctccttggcatatgaggttctgattttattttcccagcttttgag

SEQ ID NO: 4241 - DNA, 122 bp, Homo sapiens
  misc_feature (61)..(62): /note="This region represents a CpG dinucleotide"
  misc_feature (61)..(61): /note="Nucleotide may be methylated to form 5-methylcytosine"
gaaaggttccctggcaaaactccagccagcctgcatactgaggtggagcttcgggaagttcgcacaatttgcatggggaggagcctggcccctcctcttcctttgtgaaacctgggattcaa

SEQ ID NO: 4242 - DNA, 122 bp, Homo sapiens
  misc_feature (61)..(62): /note="This region represents a CpG dinucleotide"
  misc_feature (61)..(61): /note="Nucleotide may be methylated to form 5-methylcytosine"
gcaggatggtggctggcagcagcaacaggatctgtttccattttgaaccttataaattaccgagggtgcagaagtaacaggaattgtttggctggtcctcgttaagcaggagagggtctggg

SEQ ID NO: 4243 - DNA, 122 bp, Homo sapiens
  misc_feature (61)..(62): /note="This region represents a CpG dinucleotide"
  misc_feature (61)..(61): /note="Nucleotide may be methylated to form 5-methylcytosine"
attttctgtgggagaaattctctctccctggcctatttagttgtgactttctctaacaaccgtatcagattgtgtgctgcttttactaatacctctctttctggacttctaacaccccagcc

SEQ ID NO: 4244 - DNA, 122 bp, Homo sapiens
  misc_feature (61)..(62): /note="This region represents a CpG dinucleotide"
  misc_feature (61)..(61): /note="Nucleotide may be methylated to form 5-methylcytosine"
cttttgatctgcttgaaagaatcctccttaattgcccagtcaggcactccagcggctgggcgaaagttttatgacccaggattcccacagcccgtaatacacacgctcccagaagccctctt

SEQ ID NO: 4245 - DNA, 122 bp, Homo sapiens
  misc_feature (61)..(62): /note="This region represents a CpG dinucleotide"
  misc_feature (61)..(61): /note="Nucleotide may be methylated to form 5-methylcytosine"
aagcaccaaattgtacaaagcagggacgacactgtgtgaggagccattccataaatctaacgctaagcactgaacagtgcattctgtttaaggcaaaaggcgatgtatccagtcagttcagc

SEQ ID NO: 4246 - DNA, 122 bp, Homo sapiens
  misc_feature (61)..(62): /note="This region represents a CpG dinucleotide"
  misc_feature (61)..(61): /note="Nucleotide may be methylated to form 5-methylcytosine"
gcccctgaacccagaatgtagtcagctggcagttagtaattgagaacctgtttggtgacacggatgactgaatggggcccttaagtgttccatcctattgacaggggttgacaccttgactt

SEQ ID NO: 4247 - DNA, 122 bp, Homo sapiens
  misc_feature (61)..(62): /note="This region represents a CpG dinucleotide"
  misc_feature (61)..(61): /note="Nucleotide may be methylated to form 5-methylcytosine"
ggttttgcttttcttctggggcttgtcctctgaatgagagtcgtgggcttgtccacacagcgtccgcatgctctgcttgtgattattggccacgctgggaagtattttccatatttaaagta

SEQ ID NO: 4248 - DNA, 122 bp, Homo sapiens
  misc_feature (61)..(62): /note="This region represents a CpG dinucleotide"
  misc_feature (61)..(61): /note="Nucleotide may be methylated to form 5-methylcytosine"
caggcctttataggctgaattgagaagcaaaataatcaaattacttgattggttatagctcggtatttgtcttatttgggtctgatccagtggaaagtccctacttagaggtcggttggcag

SEQ ID NO: 4249 - DNA, 122 bp, Homo sapiens
  misc_feature (61)..(62): /note="This region represents a CpG dinucleotide"
  misc_feature (61)..(61): /note="Nucleotide may be methylated to form 5-methylcytosine"
gtgcatcacccagggtcattgggtggatccaatcagttaatgtgtataaaagcacagggacgattgtgcaatagaatgtgaagattcataataaaaacttcagtgtttcttgtgattcccat

SEQ ID NO: 4250 - DNA, 122 bp, Homo sapiens
  misc_feature (61)..(62): /note="This region represents a CpG dinucleotide"
  misc_feature (61)..(61): /note="Nucleotide may be methylated to form 5-methylcytosine"
tagagtgtggaataatagactttggagactcagaagggtggaagcgtggcaagggtgtaacgtgtgagaaattgcttaatgagtacaatatatgttactcaggtgatagttacactaaaagc

SEQ ID NO: 4251 - DNA, 122 bp, Homo sapiens
  misc_feature (61)..(62): /note="This region represents a CpG dinucleotide"
  misc_feature (61)..(61): /note="Nucleotide may be methylated to form 5-methylcytosine"
gcgttctcagctcccacacagtggcacacccctgagaaggttgagtcacgacctgtcatccgctgatcctagttaatgcatggtccccgcacagccaggcttaccttctgagcagcctccat

SEQ ID NO: 4252 - DNA, 122 bp, Homo sapiens
  misc_feature (61)..(62): /note="This region represents a CpG dinucleotide"
  misc_feature (61)..(61): /note="Nucleotide may be methylated to form 5-methylcytosine"
ggggaaggcaaaaagggaacttgcaacagagaccagccttatcgcgctgatacactaggtcgcctgggtggggtgctcaatccctgtttgtggggatgttgaggaatcaggaaacatgaaat

SEQ ID NO: 4253 - DNA, 122 bp, Homo sapiens
  misc_feature (61)..(62): /note="This region represents a CpG dinucleotide"
  misc_feature (61)..(61): /note="Nucleotide may be methylated to form 5-methylcytosine"
cgggccacaagagcgaaactccgtctcaaaaaaaaaagcaaaagatactaccaagccctgcggagcaaggtacctcacacttcatgagcgagttaagatgggtttcacaatttttcaagcaa

SEQ ID NO: 4254 - DNA, 122 bp, Homo sapiens
  misc_feature (61)..(62): /note="This region represents a CpG dinucleotide"
  misc_feature (61)..(61): /note="Nucleotide may be methylated to form 5-methylcytosine"
agagaatttaaaagcagatttgaatatacaattctcaaagcagaaaaccaaacagcaggccgagtgccatggctcacacctgtaatcccagcccttcaggaggctgaggcaagcagattgct

SEQ ID NO: 4255 - DNA, 122 bp, Homo sapiens
  misc_feature (61)..(62): /note="This region represents a CpG dinucleotide"
  misc_feature (61)..(61): /note="Nucleotide may be methylated to form 5-methylcytosine"
caccccccagagcgaagctgcctgtacaggccacgtcctctcctccagcagccggctacgcgcagctctccggcacagccatcacctgcaccactaaagcgggtggcagtttctgcccgtga

SEQ ID NO: 4256 - DNA, 122 bp, Homo sapiens
  misc_feature (61)..(62): /note="This region represents a CpG dinucleotide"
  misc_feature (61)..(61): /note="Nucleotide may be methylated to form 5-methylcytosine"
tttgttgtcacccttggtcagccgcttggttcttagtcacagtgctaattgtgctctctccgtaatgtgcacattctgccttggtttcagctgccagattctttaagcactcagtatgttca

SEQ ID NO: 4257 - DNA, 122 bp, Homo sapiens
  misc_feature (61)..(62): /note="This region represents a CpG dinucleotide"
  misc_feature (61)..(61): /note="Nucleotide may be methylated to form 5-methylcytosine"
gaagcaattttaatgccccataactcaaatgcctccctgttgctttgctaatgttgtaaacgttgtaaaacacggtgtcacgctcgtccgtgttcatgtgaagagtccaccaacaggctttg

SEQ ID NO: 4258 - DNA, 122 bp, Homo sapiens
  misc_feature (61)..(62): /note="This region represents a CpG dinucleotide"
  misc_feature (61)..(61): /note="Nucleotide may be methylated to form 5-methylcytosine"
cttctgagtgaagtcctggttttgtttagttacatgaggccctggcaggcccgggaaaaccggatcccatcctagactcccagtgaactctaactattctcagctcgtcagagcacagcatt

SEQ ID NO: 4259 - DNA, 122 bp, Homo sapiens
  misc_feature (61)..(62): /note="This region represents a CpG dinucleotide"
  misc_feature (61)..(61): /note="Nucleotide may be methylated to form 5-methylcytosine"
acaaaagccccagccctcagcaaagcagacatgatccacattataatttaatatgagctacgtgtaataaccagcattccattttggacaagggtggtgaagaagtaagagattcagtgacc

SEQ ID NO: 4260 - DNA, 122 bp, Homo sapiens
  misc_feature (61)..(62): /note="This region represents a CpG dinucleotide"
  misc_feature (61)..(61): /note="Nucleotide may be methylated to form 5-methylcytosine"
ggactggtttttctggaggaaaaatactgggagcccatttgctgaatgtgcaaaatgacacgctctgccaacaggtgctccagtgacaaaggagcctcagcccgagagtgggtcacacaaga

SEQ ID NO: 4261 - DNA, 122 bp, Homo sapiens
  misc_feature (61)..(62): /note="This region represents a CpG dinucleotide"
  misc_feature (61)..(61): /note="Nucleotide may be methylated to form 5-methylcytosine"
agtaagattcttgttatacagttctctggcttcagttctaacacattattttattgcctccgttacttaaatataatcattaccactcttccaaaactgccatgaggcctgcactgcttgga

SEQ ID NO: 4262 - DNA, 122 bp, Homo sapiens
  misc_feature (61)..(62): /note="This region represents a CpG dinucleotide"
  misc_feature (61)..(61): /note="Nucleotide may be methylated to form 5-methylcytosine"
aactaaagcccttttctctcgcagctgggaagcagatagccttgggcaaatttccaagtccgtcttgccctgacctggaaacagactcccggctgctgttgaggtcacagtgagagtgagac

SEQ ID NO: 4263 - DNA, 122 bp, Homo sapiens
  misc_feature (61)..(62): /note="This region represents a CpG dinucleotide"
  misc_feature (61)..(61): /note="Nucleotide may be methylated to form 5-methylcytosine"
tctaaaaaaaaataccataagaagaatcagaatgtaccataagaaatcagatgcaaagcacgttaatgtcattggtaagttttacagagtctaaaaggattagcaaagggtagcaggagctt

SEQ ID NO: 4264 - DNA, 122 bp, Homo sapiens
  misc_feature (61)..(62): /note="This region represents a CpG dinucleotide"
  misc_feature (61)..(61): /note="Nucleotide may be methylated to form 5-methylcytosine"
catttacctcctcttggagctctgttggagttaaaagtctctactgaatcttaaaaaggacgcaaatgtcaaaaagagacaaatcccagccaagtgatgggaaatgtgatttcaggataata

SEQ ID NO: 4265 - DNA, 122 bp, Homo sapiens
  misc_feature (61)..(62): /note="This region represents a CpG dinucleotide"
  misc_feature (61)..(61): /note="Nucleotide may be methylated to form 5-methylcytosine"
tagttttaggcgaggcagatatttctctgtggccacttctccttggcaggaaacttctgacgcaccggaggtatattagcaaatcagcagtgctgtctcgtcatcaggtttcaaagagttgg

SEQ ID NO: 4266 - DNA, 122 bp, Homo sapiens
  misc_feature (61)..(62): /note="This region represents a CpG dinucleotide"
  misc_feature (61)..(61): /note="Nucleotide may be methylated to form 5-methylcytosine"
ccccttttggctcagggtggctccttggcctcactagcaaagaccgctcagagctgaatacggtgtgccctggagagctgcacaaggattaaggaaaaagctgagtgtaactaaagctcttt

SEQ ID NO: 4267 - DNA, 122 bp, Homo sapiens
  misc_feature (61)..(62): /note="This region represents a CpG dinucleotide"
  misc_feature (61)..(61): /note="Nucleotide may be methylated to form 5-methylcytosine"
tacaagttatctccagggggtaaaattccagtgcagaataacctataaatactgtggcatcgcagctagagagaaaacagattgatgtagtcctagtttggaggtcaattggctcagtaact

SEQ ID NO: 4268 - DNA, 122 bp, Homo sapiens
  misc_feature (61)..(62): /note="This region represents a CpG dinucleotide"
  misc_feature (61)..(61): /note="Nucleotide may be methylated to form 5-methylcytosine"
gcgggaacccagcagcccagcggtcctctcccacgggcccagcctccctcccgccgccagcgccgcgtcaccgccaccccgattgtcacacactcaccacggggagaggccgcggcccagag

SEQ ID NO: 4269 - DNA, 122 bp, Homo sapiens
  misc_feature (61)..(62): /note="This region represents a CpG dinucleotide"
  misc_feature (61)..(61): /note="Nucleotide may be methylated to form 5-methylcytosine"
agaaaccatttctttccctttggatcagcaactctcaggccacagccactgggttaatgacgactgtatacctgccacctgaaggagtctaagagaagatcagcactgggacagaagccgaa

SEQ ID NO: 4270 - DNA, 122 bp, Homo sapiens
  misc_feature (61)..(62): /note="This region represents a CpG dinucleotide"
  misc_feature (61)..(61): /note="Nucleotide may be methylated to form 5-methylcytosine"
gttctcctacagccatggtaaggactttgacttttactctgagatgaaaagccagaggagcggcatgacctggaattatgttttaactaggatcacattgtctgctgtatggagaataggcc

SEQ ID NO: 4271 - DNA, 122 bp, Homo sapiens
  misc_feature (61)..(62): /note="This region represents a CpG dinucleotide"
  misc_feature (61)..(61): /note="Nucleotide may be methylated to form 5-methylcytosine"
cggtaggaagtctaaggtatccaggagccaaaataatatatatgttccaggctttaagtgcgtcagagaatactcccaatccaggacacagaaaggcagatgggactggtattactactcta

SEQ ID NO: 4272 - DNA, 122 bp, Homo sapiens
  misc_feature (61)..(62): /note="This region represents a CpG dinucleotide"
  misc_feature (61)..(61): /note="Nucleotide may be methylated to form 5-methylcytosine"
cagcagtacatgcgagcacatggacatggggcagggcaccagggagaatggcaagacacacgatgaatagacagagcccagcagcaggtccaagtttgtttacatgtgatgctactctgtgc

SEQ ID NO: 4273 - DNA, 122 bp, Homo sapiens
  misc_feature (61)..(62): /note="This region represents a CpG dinucleotide"
  misc_feature (61)..(61): /note="Nucleotide may be methylated to form 5-methylcytosine"
gaaccagttccctcccaccttttgtttggagccagtgattcagctgagcacttctgggtccggaaatgcctcagcaccagaatcaagttcacaagaaagctgaatcaggagcgtttgtctcg

SEQ ID NO: 4274 - DNA, 122 bp, Homo sapiens
  misc_feature (61)..(62): /note="This region represents a CpG dinucleotide"
  misc_feature (61)..(61): /note="Nucleotide may be methylated to form 5-methylcytosine"
cttccttgtctgtttgccatgttgcgtactttgtgcagccatcctgactttgattaacagcgtcatctttatagcatcttcgtcctttgagcagtaattggtactattgtgtgcaaatgaat

SEQ ID NO: 4275 - DNA, 122 bp, Homo sapiens
  misc_feature (61)..(62): /note="This region represents a CpG dinucleotide"
  misc_feature (61)..(61): /note="Nucleotide may be methylated to form 5-methylcytosine"
tgccaaaagcatataattcaacttctgaaaaatacgaatggtcttcatcactgcagacaccgccccagcattttgaatcatcaaggtagctacttgtattctgtttgcagtatgtagtttgc

SEQ ID NO: 4276 - DNA, 122 bp, Homo sapiens
  misc_feature (61)..(62): /note="This region represents a CpG dinucleotide"
  misc_feature (61)..(61): /note="Nucleotide may be methylated to form 5-methylcytosine"
gtcccggaattttcagctcagaccagttttacagatgactgtatctcagtgtgaatatctcgcaggtcatgtttttaacctctttcctgtgttcatcagaaactggtggggcctgatgtcca

SEQ ID NO: 4277 - DNA, 122 bp, Homo sapiens
  misc_feature (61)..(62): /note="This region represents a CpG dinucleotide"
  misc_feature (61)..(61): /note="Nucleotide may be methylated to form 5-methylcytosine"
agaaagaccctgtctcaaacatacatacatatatatgattttttaacacacacacaagtacgtatgtgtatatgttacgtgtgtgtgtgggtatgtatattcacattcagtgagatgatttc

SEQ ID NO: 4278 - DNA, 122 bp, Homo sapiens
  misc_feature (61)..(62): /note="This region represents a CpG dinucleotide"
  misc_feature (61)..(61): /note="Nucleotide may be methylated to form 5-methylcytosine"
tttggcaagatggtcagggcagtttttaaacacctcatgtagctgtccagggttcctgagcgcccaagtattaattcacctcatttttgagcaggattcttccttctgtgaaagcaagagaa

SEQ ID NO: 4279 - DNA, 122 bp, Homo sapiens
  misc_feature (61)..(62): /note="This region represents a CpG dinucleotide"
  misc_feature (61)..(61): /note="Nucleotide may be methylated to form 5-methylcytosine"
cctcaccaacctcactcacactaagtacccacagctcttgtcgggcatcagagacatctccgaggagaccatgactgaggtccacaacctatacaagatgatggccaatgggatcctgaagg

SEQ ID NO: 4280 - DNA, 122 bp, Homo sapiens
  misc_feature (61)..(62): /note="This region represents a CpG dinucleotide"
  misc_feature (61)..(61): /note="Nucleotide may be methylated to form 5-methylcytosine"
aaagacagttatttaattaagatgtgcgttatattattttttactttttaaggaataacacgttttaagacttgagattatctgttgagtgaccttgcagctgcgcagctagagaaacagtg

SEQ ID NO: 4281 - DNA, 122 bp, Homo sapiens
  misc_feature (61)..(62): /note="This region represents a CpG dinucleotide"
  misc_feature (61)..(61): /note="Nucleotide may be methylated to form 5-methylcytosine"
tgacagcacagcagagtggtcagacagcagagtgccctaggctgcgcaaagaatgactgacgcttaaaagtgactaaggactttattgagagcctgcctagcttggtgaaatgccaagtcct

SEQ ID NO: 4282 - DNA, 122 bp, Homo sapiens
  misc_feature (61)..(62): /note="This region represents a CpG dinucleotide"
  misc_feature (61)..(61): /note="Nucleotide may be methylated to form 5-methylcytosine"
cagctgtaagcaagacaaagttcccaccctcatagagctaacaggcattaaacaaataaccgtacaaatgtttacagttatgagcaatgctataaaagaaaggcaggaagctatgacaggcc

SEQ ID NO: 4283 - DNA, 122 bp, Homo sapiens
  misc_feature (61)..(62): /note="This region represents a CpG dinucleotide"
  misc_feature (61)..(61): /note="Nucleotide may be methylated to form 5-methylcytosine"
ggcccatgcatctagtgctgctgtcctggacagagcggctctaagtgatctgcttttacacgctttatggtccgactatacataatcctcccattagtaactaaagtattggccaataaatt

SEQ ID NO: 4284 - DNA, 122 bp, Homo sapiens
  misc_feature (61)..(62): /note="This region represents a CpG dinucleotide"
  misc_feature (61)..(61): /note="Nucleotide may be methylated to form 5-methylcytosine"
actcaccactgaatatgtatgtgagatgagacaaacaaacttgttgtcaagtggagtgaccgggctatgtcgtcagcatcacattgtgtccctggaaagtagggtggatgccaagaaataat

SEQ ID NO: 4285 - DNA, 122 bp, Homo sapiens
  misc_feature (61)..(62): /note="This region represents a CpG dinucleotide"
  misc_feature (61)..(61): /note="Nucleotide may be methylated to form 5-methylcytosine"
ccatgtagcttggagcttgtgccagcatttccattacaaaaatcctataatccaaagccacggcaaattgaataaatagctaataattaagttgttgcccctctcctattccagaaaaataa

SEQ ID NO: 4286 - DNA, 122 bp, Homo sapiens
  misc_feature (61)..(62): /note="This region represents a CpG dinucleotide"
  misc_feature (61)..(61): /note="Nucleotide may be methylated to form 5-methylcytosine"
aattgaagaataatataccgatagcttaggtctagggataaagctacatgacagctttcacgggataagcagagctcaagtaagtagttataactgtgatgacatttacaaagctgaagttg

SEQ ID NO: 4287 - DNA, 122 bp, Homo sapiens
  misc_feature (61)..(62): /note="This region represents a CpG dinucleotide"
  misc_feature (61)..(61): /note="Nucleotide may be methylated to form 5-methylcytosine"
agtgagtcagactggagtttcgctgccataagccaaggagcgtggaggattcctgagttgcgtggaatggattttctcttacagtccccagaaggagccagccctgccaacaccttgatgtt

SEQ ID NO: 4288 - DNA, 122 bp, Homo sapiens
  misc_feature (61)..(62): /note="This region represents a CpG dinucleotide"
  misc_feature (61)..(61): /note="Nucleotide may be methylated to form 5-methylcytosine"
tctgaatattattcattctttcgttctatattctgatcagcttcaggtagctgaagttaacgttttccactttggagagtgagttgccttgggtttatagtaagtgacaaaaacaacaatct

SEQ ID NO: 4289 - DNA, 122 bp, Homo sapiens
  misc_feature (61)..(62): /note="This region represents a CpG dinucleotide"
  misc_feature (61)..(61): /note="Nucleotide may be methylated to form 5-methylcytosine"
ttactgagatcagatctcactatactgcccatgctgaagtgcagtggctattcacaggtacgatcatgggccagtgtcatgatcaagtgcagccttgaactcctgggctcaagtgatcttcc

SEQ ID NO: 4290 - DNA, 122 bp, Homo sapiens
  misc_feature (61)..(62): /note="This region represents a CpG dinucleotide"
  misc_feature (61)..(61): /note="Nucleotide may be methylated to form 5-methylcytosine"
cagatgcgggctaggttgcagagaaaaaggaatgcttatatgttgtgggaatcaggaggccggagagatcactgggtgcaacaggaaggttttatttaggtggccactggcccagcggatta

SEQ ID NO: 4291 - DNA, 122 bp, Homo sapiens
  misc_feature (61)..(62): /note="This region represents a CpG dinucleotide"
  misc_feature (61)..(61): /note="Nucleotide may be methylated to form 5-methylcytosine"
atgaatcctccttacttctctctgaaccggttccctaagggctctagtcttaaacttgcacggcatcttctccattaaagctgtgtgtgatctctgctaaacctttgtaccctttccagcaa

SEQ ID NO: 4292 - DNA, 122 bp, Homo sapiens
  misc_feature (61)..(62): /note="This region represents a CpG dinucleotide"
  misc_feature (61)..(61): /note="Nucleotide may be methylated to form 5-methylcytosine"
ctgacctcaagtcatccgcccacctctgactctttctgggattgcaggtatgcgcccccacgcctggcctaatttttgaatgtttagcagagatggggtttcaccatgttggccaggctgaa

SEQ ID NO: 4293 - DNA, 122 bp, Homo sapiens
  misc_feature (61)..(62): /note="This region represents a CpG dinucleotide"
  misc_feature (61)..(61): /note="Nucleotide may be methylated to form 5-methylcytosine"
taccccagtgctgggcgtctgtaggtatggacaggcccttgctttaaggtagatgcccgccgcaaaacgggaagttgcattatggctgcctcccgctggggttctttttctcttggtatttt

SEQ ID NO: 4294 - DNA, 122 bp, Homo sapiens
  misc_feature (61)..(62): /note="This region represents a CpG dinucleotide"
  misc_feature (61)..(61): /note="Nucleotide may be methylated to form 5-methylcytosine"
gaaagccccttgagtttaccttatcattctggtatgcagtcacagcgatgaattcagtttcggggaacaagtatgtccgaaatgtactataagggagtttcaagatgtcattggctcttaca

SEQ ID NO: 4295 - DNA, 122 bp, Homo sapiens
  misc_feature (61)..(62): /note="This region represents a CpG dinucleotide"
  misc_feature (61)..(61): /note="Nucleotide may be methylated to form 5-methylcytosine"
tacagtctgctgcagaggagtgctgcccgagggactgcaccgcattccaaatgttgggtgcgggaggggaataaaaacctcatttcacctttttcttcatgccggtcttatttcctctgggt

SEQ ID NO: 4296 - DNA, 122 bp, Homo sapiens
  misc_feature (61)..(62): /note="This region represents a CpG dinucleotide"
  misc_feature (61)..(61): /note="Nucleotide may be methylated to form 5-methylcytosine"
cctttttccctcacttccttttcacactttcctgccaagtggcattatagcatcagcgaacggatcacattgagcgaggcccaagatgcttctccagcctcgatgtctcaaccctgagaatg

SEQ ID NO: 4297 - DNA, 122 bp, Homo sapiens
  misc_feature (61)..(62): /note="This region represents a CpG dinucleotide"
  misc_feature (61)..(61): /note="Nucleotide may be methylated to form 5-methylcytosine"
ctacctgtgtcatgctccaaacgcctggcagggaggagacggacttacgagtttcaaacacggttggttttcacccctgagctagtcaggcaagagtagagtcagccaaagaagactaggta

SEQ ID NO: 4298 - DNA, 122 bp, Homo sapiens
  misc_feature (61)..(62): /note="This region represents a CpG dinucleotide"
  misc_feature (61)..(61): /note="Nucleotide may be methylated to form 5-methylcytosine"
tcacttagactctgcccaattcgggctaatttaatcaaattgtagttgtgtttcctgaggcgtaaagaaaaggaggaaggtgtttcatatgcctgtttaggacccttcctattttgcctaac

SEQ ID NO: 4299 - DNA, 122 bp, Homo sapiens
  misc_feature (61)..(62): /note="This region represents a CpG dinucleotide"
  misc_feature (61)..(61): /note="Nucleotide may be methylated to form 5-methylcytosine"
tctagccatagtccactgccatacaaataagaggctaactttaagaaattcaattaaagccgggtgcggtctctcatgcttgtaatcccagcactttgggaggctgaggcaggcagatcacc

SEQ ID NO: 4300 - DNA, 122 bp, Homo sapiens
  misc_feature (61)..(62): /note="This region represents a CpG dinucleotide"
  misc_feature (61)..(61): /note="Nucleotide may be methylated to form 5-methylcytosine"
ctcagaacctattgttgtattcaactatacttgcacttgctcctatttgccctacatgggcgtaactccttaaaccaagctttgttcagaattcctctgattgatcatttaagtaaatttaa

SEQ ID NO: 4301 - DNA, 122 bp, Homo sapiens
  misc_feature (61)..(62): /note="This region represents a CpG dinucleotide"
  misc_feature (61)..(61): /note="Nucleotide may be methylated to form 5-methylcytosine"
aaataaaacaaggcttaagcagaaagtcctcacaatggtgtccacattccatcaggatgacgtaatcgaaggttggaaccaggcggcctctgcctttgtgttccgggacccctcactcagtg

SEQ ID NO: 4302 - DNA, 122 bp, Homo sapiens
  misc_feature (61)..(62): /note="This region represents a CpG dinucleotide"
  misc_feature (61)..(61): /note="Nucleotide may be methylated to form 5-methylcytosine"
aatcaggtacttacctctactcggctctgaatagccattgcataaatgaggagtcatattcgtaaggattgacctccagataaaaactaatatcagttgaggaagatacaggatggcaggtt

SEQ ID NO: 4303 - DNA, 122 bp, Homo sapiens
  misc_feature (61)..(62): /note="This region represents a CpG dinucleotide"
  misc_feature (61)..(61): /note="Nucleotide may be methylated to form 5-methylcytosine"
tacacattccccaaagaggtcctactttgaatgaccaccagggatgcactagtctggcagcgtgggtctgcacgagtaagtgcctgtcaggccttctgaaagaagtggtagacgtgctgggg

SEQ ID NO: 4304 - DNA, 122 bp, Homo sapiens
  misc_feature (61)..(62): /note="This region represents a CpG dinucleotide"
  misc_feature (61)..(61): /note="Nucleotide may be methylated to form 5-methylcytosine"
agagactcgtagacacatgatgacctcacttttattgtcctctggagcattccttcctgtcgtggaaattggcttaggcctccccctccaccagtgctgggtccaggtcttgctctgctgct

SEQ ID NO: 4305 - DNA, 122 bp, Homo sapiens
  misc_feature (61)..(62): /note="This region represents a CpG dinucleotide"
  misc_feature (61)..(61): /note="Nucleotide may be methylated to form 5-methylcytosine"
gccggcctggcagatccatctgtgtgatagggtcttgctgtgctcatgcatcccctgggacgccacaggttcttgcctggagatctgctgcaggctgggaaggcagaggtactgaacatgta

SEQ ID NO: 4306 - DNA, 122 bp, Homo sapiens
  misc_feature (61)..(62): /note="This region represents a CpG dinucleotide"
  misc_feature (61)..(61): /note="Nucleotide may be methylated to form 5-methylcytosine"
aggcgtgtgcagcttacctgctttccacagggcagtcctctgttcgttgttggaattaaacgcttttgcaaatctatgtgactctaataagcagtccagtagcttaaaaagttgttgtgatg

SEQ ID NO: 4307 - DNA, 122 bp, Homo sapiens
  misc_feature (61)..(62): /note="This region represents a CpG dinucleotide"
  misc_feature (61)..(61): /note="Nucleotide may be methylated to form 5-methylcytosine"
aatgcaagattgaaacagaaaatacctttaccgaggcaatcatttgccacgtgtggaaagcggatacagctgtaaactatgaaaaagggatctttgtagtacaataaaggatggaaaaagag

SEQ ID NO: 4308 - DNA, 122 bp, Homo sapiens
  misc_feature (61)..(62): /note="This region represents a CpG dinucleotide"
  misc_feature (61)..(61): /note="Nucleotide may be methylated to form 5-methylcytosine"
caaagcctggggctcacagatgactaataaaattttactcacatagatgtagagaaacgtcgacaagcagttttggtttggttttggtttcactagtggataattttgttaaccgttgtctc

SEQ ID NO: 4309 - DNA, 122 bp, Homo sapiens
  misc_feature (61)..(62): /note="This region represents a CpG dinucleotide"
  misc_feature (61)..(61): /note="Nucleotide may be methylated to form 5-methylcytosine"
cattatggcacaatatagttagtctcatgaagaaagcataagaaaattcttatagctgagcggaaagaaatcacgctgggctgtcagccacatgtaaagctcatagcaattgttatctcata

SEQ ID NO: 4310 - DNA, 122 bp, Homo sapiens
  misc_feature (61)..(62): /note="This region represents a CpG dinucleotide"
  misc_feature (61)..(61): /note="Nucleotide may be methylated to form 5-methylcytosine"
caagaaaaatatttgtagggcctggaaaaaacatccaggctttttttatttctgccacagcgtgttaggctggcagggccccaccttccactccctggtgaaggaaagtttgccgaagaaag

SEQ ID NO: 4311 - DNA, 122 bp, Homo sapiens
  misc_feature (61)..(62): /note="This region represents a CpG dinucleotide"
  misc_feature (61)..(61): /note="Nucleotide may be methylated to form 5-methylcytosine"
ctcaggtgatccacccaccttggcctcccaaagtgttgaaattacaggtgtgagccactgcgcttggcctaaaggacattttgggaaccggtgttaatgtctattgaaaccttttatttttg

SEQ ID NO: 4312 - DNA, 122 bp, Homo sapiens
  misc_feature (61)..(62): /note="This region represents a CpG dinucleotide"
  misc_feature (61)..(61): /note="Nucleotide may be methylated to form 5-methylcytosine"
gcaacaaagctgctttgtggagcagggctcccaataggcagtgtgcccagagtagcagctcggaagcagtactgcaatcacatttatacccactttcaactatatgcaaatttaggggtgga

SEQ ID NO: 4313 - DNA, 122 bp, Homo sapiens
  misc_feature (61)..(62): /note="This region represents a CpG dinucleotide"
  misc_feature (61)..(61): /note="Nucleotide may be methylated to form 5-methylcytosine"
tgtgcaaccatcaccacagtccatttaaaaaggaaggaaatgttgacacatgcaacaatacggatgaaccgaggacattatactagtgaaataaaccagtcggaaaaagacaaatattattt

SEQ ID NO: 4314 - DNA, 122 bp, Homo sapiens
  misc_feature (61)..(62): /note="This region represents a CpG dinucleotide"
  misc_feature (61)..(61): /note="Nucleotide may be methylated to form 5-methylcytosine"
atcatctgggggccctttctgggtaggaacctgtccagtgagaggatgtcactcagcagccgcttccctcttccaatctgtgtcccgggagccaggcgttctgagaggaggaaggcagtttc

SEQ ID NO: 4315 - DNA, 122 bp, Homo sapiens
  misc_feature (61)..(62): /note="This region represents a CpG dinucleotide"
  misc_feature (61)..(61): /note="Nucleotide may be methylated to form 5-methylcytosine"
caaagtaacaaatttgctggtgccaaaatttatttagcctgtttcactgggacaaactcacgttcaatgccactcagtataatttcaagtctgataagcatctaagtatttttaccccgctt

SEQ ID NO: 4316 - DNA, 122 bp, Homo sapiens
  misc_feature (61)..(62): /note="This region represents a CpG dinucleotide"
  misc_feature (61)..(61): /note="Nucleotide may be methylated to form 5-methylcytosine"
gaaaagcagatggcaagacctgcaggaccagatgccaggctgccttggtttgagaggcaacgaagggttagaagaatagcctggcttggcagtgacacgtcggagctgtgctttagaaataa

SEQ ID NO: 4317 - DNA, 122 bp, Homo sapiens
  misc_feature (61)..(62): /note="This region represents a CpG dinucleotide"
  misc_feature (61)..(61): /note="Nucleotide may be methylated to form 5-methylcytosine"
gtctctctggaatcagatggaataaatatagacaaataaatataaatatacaccagctcacgcacagagacatcaaatggagtgccgggtttacaaattgctgactgtgttcataaacaaac

SEQ ID NO: 4318 - DNA, 122 bp, Homo sapiens
  misc_feature (61)..(62): /note="This region represents a CpG dinucleotide"
  misc_feature (61)..(61): /note="Nucleotide may be methylated to form 5-methylcytosine"
tcaaaacatttccaaggagcacaacctgcagcaagtagagttggcagctcccttgggtgacgcgtgtctgacttagcttacttctaattggcagaaaattcttacttgagttaacgtacagg

SEQ ID NO: 4319 - DNA, 122 bp, Homo sapiens
  misc_feature (61)..(62): /note="This region represents a CpG dinucleotide"
  misc_feature (61)..(61): /note="Nucleotide may be methylated to form 5-methylcytosine"
tgggaattcagcccagtaggtctcaggctgattttacccagcccttattcaagacggagtcgctctggtttacatacttctgacagtgatggttgcaaaacaacgcgaatgtacttaatacc

SEQ ID NO: 4320 - DNA, 122 bp, Homo sapiens
  misc_feature (61)..(62): /note="This region represents a CpG dinucleotide"
  misc_feature (61)..(61): /note="Nucleotide may be methylated to form 5-methylcytosine"
ctggaatcagctgaaattcactctctcacgtctgacagcaaggctgctgtgtgctgagaccgtcgctggggctgacagccgctttatgtgttctcttcacataagccagcttgagcttcttg

SEQ ID NO: 4321 - DNA, 122 bp, Homo sapiens
  misc_feature (61)..(62): /note="This region represents a CpG dinucleotide"
  misc_feature (61)..(61): /note="Nucleotide may be methylated to form 5-methylcytosine"
gacagtgccactctacagtgggttttcttttctttttgtacaaggaaatcaacgagcccacggacaagaccttggtaatgtcccagtcccagttgccagttgtgctgttccacatgcagatt

SEQ ID NO: 4322 - DNA, 122 bp, Homo sapiens
  misc_feature (61)..(62): /note="This region represents a CpG dinucleotide"
  misc_feature (61)..(61): /note="Nucleotide may be methylated to form 5-methylcytosine"
tattatcagcacagagaggttaaataacttgcctaaggacacacaggaagtggcagagcccggttatatggcaccaaagtctgagctcttcaccactattctatactgcctttcaggttatg

SEQ ID NO: 4323 - DNA, 122 bp, Homo sapiens
  misc_feature (61)..(62): /note="This region represents a CpG dinucleotide"
  misc_feature (61)..(61): /note="Nucleotide may be methylated to form 5-methylcytosine"
taactcctggcttcaagtgatcctcctgcctggcttcccaaagtgttgggattacagatgcgagccatagagcctggccaaagttaaactttaaaaatcaaagacaggccgggtatggtgac

SEQ ID NO: 4324 - DNA, 122 bp, Homo sapiens
  misc_feature (61)..(62): /note="This region represents a CpG dinucleotide"
  misc_feature (61)..(61): /note="Nucleotide may be methylated to form 5-methylcytosine"
ctggaagacagcatgatcagcagcttccaaggcagagcctggcgtcagaaagctgcattgcgctaatgctgaagcctgtgggagcctgttggagagacacttggatgtttagcgagctggtg

SEQ ID NO: 4325 - DNA, 122 bp, Homo sapiens
  misc_feature (61)..(62): /note="This region represents a CpG dinucleotide"
  misc_feature (61)..(61): /note="Nucleotide may be methylated to form 5-methylcytosine"
ggtatttcccatcaggactctgttcagagaacatatggagaaattagcactttcagactccgtgttgttaagctgtccctaccaaacacaagcaaacctcctgctatctacaggtctaactg

SEQ ID NO: 4326 - DNA, 122 bp, Homo sapiens
  misc_feature (61)..(62): /note="This region represents a CpG dinucleotide"
  misc_feature (61)..(61): /note="Nucleotide may be methylated to form 5-methylcytosine"
ttttattctctgggttctctgggttagctcaaataattcatggttttctggcttgtgtgtcggattgtgtgttcaagacaggcttatcatgtctgagatgcttctactgcctttagatctga

SEQ ID NO: 4327 - DNA, 122 bp, Homo sapiens
  misc_feature (61)..(62): /note="This region represents a CpG dinucleotide"
  misc_feature (61)..(61): /note="Nucleotide may be methylated to form 5-methylcytosine"
tatctgccttacacatttctgttttgccagaccagctccttaatatttaatatgtgatgacgtccagggttttaattttattaaacactgaaagagagcttgttaaaatttcacaatatgac

SEQ ID NO: 4328 - DNA, 122 bp, Homo sapiens
  misc_feature (61)..(62): /note="This region represents a CpG dinucleotide"
  misc_feature (61)..(61): /note="Nucleotide may be methylated to form 5-methylcytosine"
ttggtatgaaggtcacctatgagtgatgatcacatcatgggcgtgggccagctgacaaagcgcttcctcagctgtgccctggcctcacacgggacacatggtggacacctgacaagacttag

SEQ ID NO: 4329 - DNA, 122 bp, Homo sapiens
  misc_feature (61)..(62): /note="This region represents a CpG dinucleotide"
  misc_feature (61)..(61): /note="Nucleotide may be methylated to form 5-methylcytosine"
ttctgtggaagaatagaagatagacagctccttgctgtctatcacagtatgttctggtcccgttggcctcaccttccatataatcatttccattctactgggctttagccactctggtgact

SEQ ID NO: 4330 - DNA, 122 bp, Homo sapiens
  misc_feature (61)..(62): /note="This region represents a CpG dinucleotide"
  misc_feature (61)..(61): /note="Nucleotide may be methylated to form 5-methylcytosine"
tgataagattataaaagatttctctcgaattctcaacttttggtgaggcctctactctctcgccaaacagctgagtttttaatggattgtgtctcaagacaatcaaattggcacctttgaca

SEQ ID NO: 4331 - DNA, 122 bp, Homo sapiens
  misc_feature (61)..(62): /note="This region represents a CpG dinucleotide"
  misc_feature (61)..(61): /note="Nucleotide may be methylated to form 5-methylcytosine"
cctgaagcaccacgcttagtgcattatcatccattccctggacttctagaatgagtgaaccgtgggagaatcaggaacagcatcgggggaaggaggagaggaaagtgtcggatcaggctttt

SEQ ID NO: 4332 - DNA, 122 bp, Homo sapiens
  misc_feature (61)..(62): /note="This region represents a CpG dinucleotide"
  misc_feature (61)..(61): /note="Nucleotide may be methylated to form 5-methylcytosine"
gaaccaggtcccggctcttggccatatcctcccaggaacgaagcaggtgcctctgccaagcgttacttgaggtggaagggctcatttaggtaacttgtaaaccttgacagaagcatcttggc

SEQ ID NO: 4333 - DNA, 122 bp, Homo sapiens
  misc_feature (61)..(62): /note="This region represents a CpG dinucleotide"
  misc_feature (61)..(61): /note="Nucleotide may be methylated to form 5-methylcytosine"
ctggctttaaataaacatggaataaaagagagagagagagagcgcgagcaagagtgagagcgcggagcctccagcagctgaaattagaagcagccagccccgggcagggaagccatctgcgc

SEQ ID NO: 4334 - DNA, 122 bp, Homo sapiens
  misc_feature (61)..(62): /note="This region represents a CpG dinucleotide"
  misc_feature (61)..(61): /note="Nucleotide may be methylated to form 5-methylcytosine"
tactactacagtctattggctcccatgatagagtctgctaatcatagagcctgcctcctgcggcaagatcaggcatgtgaaggtaccaggcaaatatgaatcttcaggattctcatcagtat

SEQ ID NO: 4335 - DNA, 122 bp, Homo sapiens
  misc_feature (61)..(62): /note="This region represents a CpG dinucleotide"
  misc_feature (61)..(61): /note="Nucleotide may be methylated to form 5-methylcytosine"
gcggtagaattttccgctatgggtcattctcggtgtccgcggggaagggcgtgacaacgacgggcgtgacggcgaagcaacagtgtctcgagagcgctgccgcccggagggcgccaggagaa

SEQ ID NO: 4336 - DNA, 122 bp, Homo sapiens
  misc_feature (61)..(62): /note="This region represents a CpG dinucleotide"
  misc_feature (61)..(61): /note="Nucleotide may be methylated to form 5-methylcytosine"
acagttctgaagatgactacttagccttggcttaggatgtttcctagaactgatgatatgcgtttcctaagaaacatctctttctttggaagctatgactaatttaccctctctcctcctct

SEQ ID NO: 4337 - DNA, 122 bp, Homo sapiens
  misc_feature (61)..(62): /note="This region represents a CpG dinucleotide"
  misc_feature (61)..(61): /note="Nucleotide may be methylated to form 5-methylcytosine"
cgcttcacaccctggttgcgagagggccgcatgctcgacttcctgcctccccaccgcgagcgcttcacctgagggacccctgatgccgcttcctcacagaacctgcaggcactggcaccacg

SEQ ID NO: 4338 - DNA, 122 bp, Homo sapiens
  misc_feature (61)..(62): /note="This region represents a CpG dinucleotide"
  misc_feature (61)..(61): /note="Nucleotide may be methylated to form 5-methylcytosine"
agaaacaacagaactttcagaacctttggcacaacagaactgcatatctgggatgttggtcgtatctttatttggtcgtactaaaacacagactctctggcactgtgagaactgtttgcctg

SEQ ID NO: 4339 - DNA, 122 bp, Homo sapiens
  misc_feature (61)..(62): /note="This region represents a CpG dinucleotide"
  misc_feature (61)..(61): /note="Nucleotide may be methylated to form 5-methylcytosine"
gcagacttagaaaggatttactgttcataacaacaaaactaattttctactgtacccagacgatctcctctaaaaatgttcctttttaagtgaccaagttaaaggtaaaggatgacttcccc

SEQ ID NO: 4340 - DNA, 122 bp, Homo sapiens
  misc_feature (61)..(62): /note="This region represents a CpG dinucleotide"
  misc_feature (61)..(61): /note="Nucleotide may be methylated to form 5-methylcytosine"
gagttcatcacaccataaaccacagggactttgtaggcatgttattgtattagcaccatacggagactactcatggaactcacatgcagagtgtgtgatgtcagagaagttgacacgaatcc

SEQ ID NO: 4341 - DNA, 122 bp, Homo sapiens
  misc_feature (61)..(62): /note="This region represents a CpG dinucleotide"
  misc_feature (61)..(61): /note="Nucleotide may be methylated to form 5-methylcytosine"
tggggatattgggatccctgtctcagtgcggcaacatgggaggcatctagtgcgacagagcggcctcacccaagtgatgtgtcatgatgaggataatgttcatggagactgatttccatttg

SEQ ID NO: 4342 - DNA, 122 bp, Homo sapiens
  misc_feature (61)..(62): /note="This region represents a CpG dinucleotide"
  misc_feature (61)..(61): /note="Nucleotide may be methylated to form 5-methylcytosine"
aagtcagctttcaaatgttgaaaaggtgaatgaagaataaaataggaagaataaaatcagcgtaaagaagtaaagcattctttgagggcagttaagtatatgtagtcttctgcccaagagat

SEQ ID NO: 4343 - DNA, 122 bp, Homo sapiens
  misc_feature (61)..(62): /note="This region represents a CpG dinucleotide"
  misc_feature (61)..(61): /note="Nucleotide may be methylated to form 5-methylcytosine"
ccattcaggtgagcagggctgttgctcagcaggtgagcctgccccgccatggagactcagcgctagagtgagaaccacatctgctcacaccaggggcctgaaccctgctaaccccacggggg

SEQ ID NO: 4344 - DNA, 122 bp, Homo sapiens
  misc_feature (61)..(62): /note="This region represents a CpG dinucleotide"
  misc_feature (61)..(61): /note="Nucleotide may be methylated to form 5-methylcytosine"
ctgacacactccctgtcttggatccagctgccgcgtgccacatgagaggtcctgcctaggcgctctggttgacagcctcagctgagcccagcctttcagtaatcccagctcaggcgccgggc

SEQ ID NO: 4345 - DNA, 122 bp, Homo sapiens
  misc_feature (61)..(62): /note="This region represents a CpG dinucleotide"
  misc_feature (61)..(61): /note="Nucleotide may be methylated to form 5-methylcytosine"
gtctcacttcaattatgctttcgagggattatagaattagcaattccagttttgatggcacgagctctgtcaaatcagagagacagatgtgagctcatgtaactgagaggcttccatctgtt

SEQ ID NO: 4346 - DNA, 122 bp, Homo sapiens
  misc_feature (61)..(62): /note="This region represents a CpG dinucleotide"
  misc_feature (61)..(61): /note="Nucleotide may be methylated to form 5-methylcytosine"
ctctatccactagttgttcttccccaagttgtggcagcccaaaatgtcttcagacatggccgtatgttccctgaaaggcagaatccccctttgttgagaaccactgtgtcaaacaaatcaag

SEQ ID NO: 4347 - DNA, 122 bp, Homo sapiens
  misc_feature (61)..(62): /note="This region represents a CpG dinucleotide"
  misc_feature (61)..(61): /note="Nucleotide may be methylated to form 5-methylcytosine"
gatttgatcaattatagaaatattcaaccttatatagtgcttaacagatcaatccatccccgtattgagctaagttttgacaagtgatattaagaaattaaaatttaaataatctttattca

SEQ ID NO: 4348 - DNA, 122 bp, Homo sapiens
  misc_feature (61)..(62): /note="This region represents a CpG dinucleotide"
  misc_feature (61)..(61): /note="Nucleotide may be methylated to form 5-methylcytosine"
acgtcaaggccatacaccagccaaataaaatttgaatcacaggggatagattccaggcctcggtatttttaaaaaactcctcaggtaattacaatgtgcagccaagtttgagaacctgtgcc

SEQ ID NO: 4349 - DNA, 122 bp, Homo sapiens
  misc_feature (61)..(62): /note="This region represents a CpG dinucleotide"
  misc_feature (61)..(61): /note="Nucleotide may be methylated to form 5-methylcytosine"
tcccaggcacatgttgtgcaactgagccatggggctagggtagaaagccgtagtgagatacggtcccgcgtctcaaagagtcagcattcaaggggcgtgtgtgtataatacaaggcggagaa

SEQ ID NO: 4350 - DNA, 122 bp, Homo sapiens
  misc_feature (61)..(62): /note="This region represents a CpG dinucleotide"
  misc_feature (61)..(61): /note="Nucleotide may be methylated to form 5-methylcytosine"
gtcggtagagatgagagctgccagtgggcaccgagattcacagctgggtgtagactctgccgcaactggctgagagaaaaagaggtttgatatgggagcagctgcttccaacccctgctaga

SEQ ID NO: 4351 - DNA, 122 bp, Homo sapiens
  misc_feature (61)..(62): /note="This region represents a CpG dinucleotide"
  misc_feature (61)..(61): /note="Nucleotide may be methylated to form 5-methylcytosine"
tcggtcttccaaagtgctgggattataggcgtgaaccaccacgcctggctgtctgccccccgcctgtcctaagcactttaaatgtgtcaactcatttggtctctttgaaaagagtggccagg

SEQ ID NO: 4352 - DNA, 122 bp, Homo sapiens
  misc_feature (61)..(62): /note="This region represents a CpG dinucleotide"
  misc_feature (61)..(61): /note="Nucleotide may be methylated to form 5-methylcytosine"
aaatgaggcatgattcactgatgaaccacttgggatctcagtgctctttatattccttttcgttgttttaagtgaaaatgtcacacattacaggaaaataaaatgtcaactatgattgacaa

SEQ ID NO: 4353 - DNA, 122 bp, Homo sapiens
  misc_feature (61)..(62): /note="This region represents a CpG dinucleotide"
  misc_feature (61)..(61): /note="Nucleotide may be methylated to form 5-methylcytosine"
atccgctgggaaagactacaaaatggaatagacctgtgtcccacaatcatgcttcccacacgcacaccaaaaggcaggggaatggagtatttagattctaactccctagagtctttggttga

SEQ ID NO: 4354 - DNA, 122 bp, Homo sapiens
  misc_feature (61)..(62): /note="This region represents a CpG dinucleotide"
  misc_feature (61)..(61): /note="Nucleotide may be methylated to form 5-methylcytosine"
tatggctttaaaaaaatctgataaagtttctcataaaggctcacccaggaaaataaataacgcaatgttacaaatacatgtccaagttgatgaagtatttatggatgtggctgaggacagaa

SEQ ID NO: 4355 - DNA, 122 bp, Homo sapiens
  misc_feature (61)..(62): /note="This region represents a CpG dinucleotide"
  misc_feature (61)..(61): /note="Nucleotide may be methylated to form 5-methylcytosine"
attttagtgagcactatttactacctgatgggtccggtgtgagctgagttacaagccccgcgtttaaaggtgggtgtggtaaccttccccagctgggcttaggaattcttagtcgacttagg

SEQ ID NO: 4356 - DNA, 122 bp, Homo sapiens
  misc_feature (61)..(62): /note="This region represents a CpG dinucleotide"
  misc_feature (61)..(61): /note="Nucleotide may be methylated to form 5-methylcytosine"
aaggttaaacctaggaacacggaagccaatgtgcccccagagaacggaagaggcggtctgcgagttcagaaggcaggcagctcatgcttgaaggtgatagccttctgcctacaagagaaatc

SEQ ID NO: 4357 - DNA, 122 bp, Homo sapiens
  misc_feature (61)..(62): /note="This region represents a CpG dinucleotide"
  misc_feature (61)..(61): /note="Nucleotide may be methylated to form 5-methylcytosine"
aagtgactaatgagcaggtaatatagatggcgtggatgtgctgtacaaagagatgattcacgtcccaggcaggacagagtgggatggcgtgagatttcgtcacattactcagaacagcatgc

SEQ ID NO: 4358 - DNA, 122 bp, Homo sapiens
  misc_feature (61)..(62): /note="This region represents a CpG dinucleotide"
  misc_feature (61)..(61): /note="Nucleotide may be methylated to form 5-methylcytosine"
actttttttttccttaccactttcatctagcaagaaatcatcctggtaacggaacttctccggtccacatgcaataaaaatgtcatcatcaccaaaaaagtcctgaaggcacatcacctaca

SEQ ID NO: 4359 - DNA, 122 bp, Homo sapiens
  misc_feature (61)..(62): /note="This region represents a CpG dinucleotide"
  misc_feature (61)..(61): /note="Nucleotide may be methylated to form 5-methylcytosine"
atgactaaagatgaagctgaattatactgcctccagcaccaaagtgttgtgcatatttaccgttcagggtttttgttcatttgtccttttcgtttttgttttttgtttgtttttatttgtcg

SEQ ID NO: 4360 - DNA, 122 bp, Homo sapiens
  misc_feature (61)..(62): /note="This region represents a CpG dinucleotide"
  misc_feature (61)..(61): /note="Nucleotide may be methylated to form 5-methylcytosine"
gcttgctgaatgtcagagaagtcactgtgttgctggaccagcagaacttgtatatccacccgttagggtgccgggaaaaccttttcactggagatgcctcactggagccagtctgctacaaa

SEQ ID NO: 4361 - DNA, 122 bp, Homo sapiens
  misc_feature (61)..(62): /note="This region represents a CpG dinucleotide"
  misc_feature (61)..(61): /note="Nucleotide may be methylated to form 5-methylcytosine"
ttcttttcttgcttggaaaggaagttggctatgaatgttatactatctgaggtacacttacggcacaacactgtatgtcagagacaacttggaagtgaacaggagcaaataatttaaataaa

SEQ ID NO: 4362 - DNA, 122 bp, Homo sapiens
  misc_feature (61)..(62): /note="This region represents a CpG dinucleotide"
  misc_feature (61)..(61): /note="Nucleotide may be methylated to form 5-methylcytosine"
cacagttatggatacatgattcacatttaaaaatccaataagaaccagagttggcaggcacgagcctggcagattggcaattattttgacgatgtgaaagttgttttttaactttcctataa

SEQ ID NO: 4363 - DNA, 122 bp, Homo sapiens
  misc_feature (61)..(62): /note="This region represents a CpG dinucleotide"
  misc_feature (61)..(61): /note="Nucleotide may be methylated to form 5-methylcytosine"
tagccgggcatggtggagcatgtctgtaatctgttactcatggagctgaggcaggacaatcgctcgaagcttggaggtggaggttgcagtgaaccgagatcacaccactgcactccagcctg

SEQ ID NO: 4364 - DNA, 122 bp, Homo sapiens
  misc_feature (61)..(62): /note="This region represents a CpG dinucleotide"
  misc_feature (61)..(61): /note="Nucleotide may be methylated to form 5-methylcytosine"
ttgatgtcagtctcattgggcctgccgttgctcttcttgggacagaagatctctttgatccggccaattcggtagggctcaggggcatccaggttgctgcctttgatgtagtcggagtattt

SEQ ID NO: 4365 - DNA, 122 bp, Homo sapiens
  misc_feature (61)..(62): /note="This region represents a CpG dinucleotide"
  misc_feature (61)..(61): /note="Nucleotide may be methylated to form 5-methylcytosine"
tttgcccttattggctttctttggattttacacttaaccagttcattcattcagcagctccgcacctttcaatgtcccaggcactattccaggtgttgggggcggtgctggtgtagacggaa

SEQ ID NO: 4366 - DNA, 122 bp, Homo sapiens
  misc_feature (61)..(62): /note="This region represents a CpG dinucleotide"
  misc_feature (61)..(61): /note="Nucleotide may be methylated to form 5-methylcytosine"
actgttcaaacatctgtatgaggtacaccgtgtgtgtgtgcgtgtgtatgcgtgtttgcgcgcctgtgctcacacacaggctcaggcggcagctatcatgacctggctattcaaataaccct

SEQ ID NO: 4367 - DNA, 122 bp, Homo sapiens
  misc_feature (61)..(62): /note="This region represents a CpG dinucleotide"
  misc_feature (61)..(61): /note="Nucleotide may be methylated to form 5-methylcytosine"
agcagaagaaagagtaccagactggagatagcaatataattacagaaaatgggaagtgaccgcacagaccagagaaatcagaaacctacatctgccgggggttggggtgtgtgtgtgtgtgt

SEQ ID NO: 4368 - DNA, 122 bp, Homo sapiens
  misc_feature (61)..(62): /note="This region represents a CpG dinucleotide"
  misc_feature (61)..(61): /note="Nucleotide may be methylated to form 5-methylcytosine"
ttgcccataaataaaacattttattatttagcttgaacattaaatttcatcggcatgcagcgtgtgttttattatctgtgccagacactaacatgtacttaaaaatgaaattctggaacgct

SEQ ID NO: 4369 - DNA, 122 bp, Homo sapiens
  misc_feature (61)..(62): /note="This region represents a CpG dinucleotide"
  misc_feature (61)..(61): /note="Nucleotide may be methylated to form 5-methylcytosine"
agcacatgaggtgggtgttctctttgccaccatagccatgacaagaggctgatcctgtgtcgtcttctgttacttggttctgcagatctaggatcctggaattcacaagtgaatgcattttg

SEQ ID NO: 4370 - DNA, 122 bp, Homo sapiens
  misc_feature (61)..(62): /note="This region represents a CpG dinucleotide"
  misc_feature (61)..(61): /note="Nucleotide may be methylated to form 5-methylcytosine"
gatacaaaccaaagtctgtctaactccagagttcacaccaccatgttatagtgccatcttcgtacttctatcctcatctccaacagacactagcattttcatttttaagtaaattgtaatat

SEQ ID NO: 4371 - DNA, 122 bp, Homo sapiens
  misc_feature (61)..(62): /note="This region represents a CpG dinucleotide"
  misc_feature (61)..(61): /note="Nucleotide may be methylated to form 5-methylcytosine"
ctagaaatgtatgatctttctgttttggagtgttcaccaattggctatctatttaagatacgtttgtgcatatttgtgtgtgggtatgtagtgtgcgtgtgtgtatttttagactcatttga

SEQ ID NO: 4372 - DNA, 122 bp, Homo sapiens
  misc_feature (61)..(62): /note="This region represents a CpG dinucleotide"
  misc_feature (61)..(61): /note="Nucleotide may be methylated to form 5-methylcytosine"
ctgtcagtatataaggaattcactgatttttttgacaattacccattgtattccattctacggatgtaccataatttatttaactaatccctgttaatagaattgagttttgttttttccag

SEQ ID NO: 4373 - DNA, 122 bp, Homo sapiens
  misc_feature (61)..(62): /note="This region represents a CpG dinucleotide"
  misc_feature (61)..(61): /note="Nucleotide may be methylated to form 5-methylcytosine"
atttcttgaaaacagccaaggatgcaggcttttgcctatcacagcaagtttacccttatgcgtgctggctgcattagcacatccctgcagttattccgtccttggcatccttaattcctgta

SEQ ID NO: 4374 - DNA, 122 bp, Homo sapiens
  misc_feature (61)..(62): /note="This region represents a CpG dinucleotide"
  misc_feature (61)..(61): /note="Nucleotide may be methylated to form 5-methylcytosine"
atacatctaggacacaaactgaaacctgctcatctgactcatcacagagcctgatgagtacgtaagaggtacataagtctttgttaaattaatttgatgagccataacaaaatcaataaagt

SEQ ID NO: 4375 - DNA, 122 bp, Homo sapiens
  misc_feature (61)..(62): /note="This region represents a CpG dinucleotide"
  misc_feature (61)..(61): /note="Nucleotide may be methylated to form 5-methylcytosine"
aaaacatttccaaggagcacaacctgcagcaagtagagttggcagctcccttgggtgacgcgtgtctgacttagcttacttctaattggcagaaaattcttacttgagttaacgtacaggct

SEQ ID NO: 4376 - DNA, 122 bp, Homo sapiens
  misc_feature (61)..(62): /note="This region represents a CpG dinucleotide"
  misc_feature (61)..(61): /note="Nucleotide may be methylated to form 5-methylcytosine"
gattacaggcgtgagccactgcgcctggcctctaatcactgttagctaccaagtgcttatcgtgtgcctggctcggtgcagactctttgtggcacctcatttaatccgcccagcaactttac

SEQ ID NO: 4377 - DNA, 122 bp, Homo sapiens
  misc_feature (61)..(62): /note="This region represents a CpG dinucleotide"
  misc_feature (61)..(61): /note="Nucleotide may be methylated to form 5-methylcytosine"
tccctgtgatgaaacttgagggctgtttctgcagtaggtgcgacacttgttgacacgacacgctggggaggccctggcaagggggcctggtgaaatgcagccccagggagctgatgaaaccc

SEQ ID NO: 4378 - DNA, 122 bp, Homo sapiens
  misc_feature (61)..(62): /note="This region represents a CpG dinucleotide"
  misc_feature (61)..(61): /note="Nucleotide may be methylated to form 5-methylcytosine"
tttatatggatcagctctttatacctttgtgtggatttcgcgtctcactcacaaagacaacggagcaagctagcagagttcatactgagatgtgagtggctttataaccagcatgaggaaga

SEQ ID NO: 4379 - DNA, 122 bp, Homo sapiens
  misc_feature (61)..(62): /note="This region represents a CpG dinucleotide"
  misc_feature (61)..(61): /note="Nucleotide may be methylated to form 5-methylcytosine"
agtaggtttctgtggacaaatacaggtgcctatcatttatagcacagtctctctgggacccgtgcaaacaactgactcatgcgtttatgagactgggttggtttgtgaatcgatgacgccca

SEQ ID NO: 4380 - DNA, 122 bp, Homo sapiens
  misc_feature (61)..(62): /note="This region represents a CpG dinucleotide"
  misc_feature (61)..(61): /note="Nucleotide may be methylated to form 5-methylcytosine"
caaactcccgacctcaagtgatccgcccgcctcagcctccgaaagtgctgggattacagacgtgagccatcgcgcacggcttagtcccaagattttagagccaagaagcgtttgcaggagga

SEQ ID NO: 4381 - DNA, 122 bp, Homo sapiens
  misc_feature (61)..(62): /note="This region represents a CpG dinucleotide"
  misc_feature (61)..(61): /note="Nucleotide may be methylated to form 5-methylcytosine"
agaaagtgcacaccctaatttagggatatttatatccatataaaataaagtgtatctccgcgtttatactgcgccacctttggggaaaagtgtagtagtctctaatcagggctggtgatggc

SEQ ID NO: 4382 - DNA, 122 bp, Homo sapiens
  misc_feature (61)..(62): /note="This region represents a CpG dinucleotide"
  misc_feature (61)..(61): /note="Nucleotide may be methylated to form 5-methylcytosine"
atctctgagtgtgaggcccatgaatctctattttcaaaaattcttcccaggcaattctgacgaagacagctcagttcaggtctgtgaactggcgtctgtaaactgctgctctagtgctttta

SEQ ID NO: 4383 - DNA, 122 bp, Homo sapiens
  misc_feature (61)..(62): /note="This region represents a CpG dinucleotide"
  misc_feature (61)..(61): /note="Nucleotide may be methylated to form 5-methylcytosine"
ggcactggaggggaaaagtggggatctgggggcccgatcctcaggcgcaggtggtgaccacgggggccagcgacacggggggcgccgaggatgcagagggtgcaccgcccttctccgccttc

SEQ ID NO: 4384 - DNA, 122 bp, Homo sapiens
  misc_feature (61)..(62): /note="This region represents a CpG dinucleotide"
  misc_feature (61)..(61): /note="Nucleotide may be methylated to form 5-methylcytosine"
ataagttccctgacagagggagtcacttgtgtgtgtatgtggtatcctttcccatacctgcggtgttgggctcatggcatccacttaatgaacgcttgctgtcagtcattgatttggagtct

SEQ ID NO: 4385 - DNA, 122 bp, Homo sapiens
  misc_feature (61)..(62): /note="This region represents a CpG dinucleotide"
  misc_feature (61)..(61): /note="Nucleotide may be methylated to form 5-methylcytosine"
acagttctacatactcaactctgagttgtctggcaagcataatggagggaggataccagccgtgaataattacagaataacctgtatcgtgtgatatgtttgaactgtcatacgtatgagtc

SEQ ID NO: 4386 - DNA, 122 bp, Homo sapiens
  misc_feature (61)..(62): /note="This region represents a CpG dinucleotide"
  misc_feature (61)..(61): /note="Nucleotide may be methylated to form 5-methylcytosine"
tatccttattacacaagtggaaaatccgagcttgtctcctcatggcatcctaaaataattcgtgataatgactaaattttaaagaaaggagaactttccacagagtaattaaacacaagctc

SEQ ID NO: 4387 - DNA, 122 bp, Homo sapiens
  misc_feature (61)..(62): /note="This region represents a CpG dinucleotide"
  misc_feature (61)..(61): /note="Nucleotide may be methylated to form 5-methylcytosine"
gagagtgccaaggagcacagagtgggagtattgtctcctcctcttcaccagctccagcaacgtatgccgcaggcatttggctagctttaacatactggtatgcagagtaaaacagacctctt

SEQ ID NO: 4388 - DNA, 122 bp, Homo sapiens
  misc_feature (61)..(62): /note="This region represents a CpG dinucleotide"
  misc_feature (61)..(61): /note="Nucleotide may be methylated to form 5-methylcytosine"
aaaagtggggaagacactaaattatacagatagattggaaataacattaggtaagaatcgcgccggttttacccacactggaaagagctgagaggtatgcatagctcttttattgctctgag

SEQ ID NO: 4389 - DNA, 122 bp, Homo sapiens
  misc_feature (61)..(62): /note="This region represents a CpG dinucleotide"
  misc_feature (61)..(61): /note="Nucleotide may be methylated to form 5-methylcytosine"
tccccctgctccccgaatcctcggcccctcccccagactctcaactcggaaatctctcgccgtcgccgccgcgcccctctcgcagcgcatcgcggcttccaactctcaaaccgttccccccc

SEQ ID NO: 4390 - DNA, 122 bp, Homo sapiens
  misc_feature (61)..(62): /note="This region represents a CpG dinucleotide"
  misc_feature (61)..(61): /note="Nucleotide may be methylated to form 5-methylcytosine"
caccagcaaattcagtgtctggtgaggtcatgcttcctggttcacagatggctttctcaccgtgtcctcacatggcccaagagacaaaggaactctcctccccattgtctctctctggtctt

SEQ ID NO: 4391 - DNA, 122 bp, Homo sapiens
  misc_feature (61)..(62): /note="This region represents a CpG dinucleotide"
  misc_feature (61)..(61): /note="Nucleotide may be methylated to form 5-methylcytosine"
ggtgaggacgggaaaagtgaataatgactgggtgtggccccgccagccacataaatcatccgctctgttaacatcaggtcactgtctccactccccgcttcccagctattgaaatatctatt

SEQ ID NO: 4392 - DNA, 122 bp, Homo sapiens
  misc_feature (61)..(62): /note="This region represents a CpG dinucleotide"
  misc_feature (61)..(61): /note="Nucleotide may be methylated to form 5-methylcytosine"
cctaaacatttatgagctcactgtcactgttcaatatcaaaaaagacacctctagtgagccgagatcatgtcactgcactccagcctgggtgacagagtgagaccctcatttcaaaaaaaaa

SEQ ID NO: 4393 - DNA, 122 bp, Homo sapiens
  misc_feature (61)..(62): /note="This region represents a CpG dinucleotide"
  misc_feature (61)..(61): /note="Nucleotide may be methylated to form 5-methylcytosine"
aggccttcttcttgtctccacagaccagcatttctggccgagcttgatatttctggctatcgctatacaggtagtaggtagctactacatgacagggaacatgacctgttgtaacaagtttc

SEQ ID NO: 4394 - DNA, 122 bp, Homo sapiens
  misc_feature (61)..(62): /note="This region represents a CpG dinucleotide"
  misc_feature (61)..(61): /note="Nucleotide may be methylated to form 5-methylcytosine"
gggcagactctgccccagagtctgcctgagttcagtgcttcagcctgccacactgagctgcgatgcatggggtgacaaacatcaattagtttaaatgttttctgaattattgcccactttaa

SEQ ID NO: 4395 - DNA, 122 bp, Homo sapiens
  misc_feature (61)..(62): /note="This region represents a CpG dinucleotide"
  misc_feature (61)..(61): /note="Nucleotide may be methylated to form 5-methylcytosine"
ttttaaacagagagcaagtgtaggagtaacaagtgccccccttgccgcggtcttgctaatcgcatcgccttttgagactttacgagacttctggggggccggtagctaagggagttactgga

SEQ ID NO: 4396 - DNA, 122 bp, Homo sapiens
  misc_feature (61)..(62): /note="This region represents a CpG dinucleotide"
  misc_feature (61)..(61): /note="Nucleotide may be methylated to form 5-methylcytosine"
accaaaaggcatatcataaaacgggtttagtctagccaagatgtctctctttgatctttccgctttcctaagtttaaagagttttactgccctgtaatagtgacgactagtaaatggcatcc

SEQ ID NO: 4397 - DNA, 122 bp, Homo sapiens
  misc_feature (61)..(62): /note="This region represents a CpG dinucleotide"
  misc_feature (61)..(61): /note="Nucleotide may be methylated to form 5-methylcytosine"
atgcaggcccagacagaaatgaatatgagatatcagtcatgcacccactctctgcacccacgcctgggggcaattgtttaaagtaattttgtcactgactagctgtctcacctgttaccttc

SEQ ID NO: 4398 - DNA, 122 bp, Homo sapiens
  misc_feature (61)..(62): /note="This region represents a CpG dinucleotide"
  misc_feature (61)..(61): /note="Nucleotide may be methylated to form 5-methylcytosine"
tggacttggtgttctatgaactatgagctaactaagttacgggaaagcagcctgcacccacggtaagatgaaaaggcagaatcctgggcctgtgcattttaattatagctctactgcctgca

SEQ ID NO: 4399 - DNA, 122 bp, Homo sapiens
  misc_feature (61)..(62): /note="This region represents a CpG dinucleotide"
  misc_feature (61)..(61): /note="Nucleotide may be methylated to form 5-methylcytosine"
acaataccattattgacaacaatgacaaacattcactaagtcgttagcagagttagtttacggtgtaaagggtgattcagaaactcatttgtcactagtggattccttgaactagtaacaaa

SEQ ID NO: 4400 - DNA, 122 bp, Homo sapiens
  misc_feature (61)..(62): /note="This region represents a CpG dinucleotide"
  misc_feature (61)..(61): /note="Nucleotide may be methylated to form 5-methylcytosine"
attctccgtgtgaagcccttccaggtgtttcaagctcttggtttataggactgtgaatgtcgtcatcttaatacagcccttcccatcactttgatccctgatggaaaaattagctctcatct

SEQ ID NO: 4401 - DNA, 122 bp, Homo sapiens
  misc_feature (61)..(62): /note="This region represents a CpG dinucleotide"
  misc_feature (61)..(61): /note="Nucleotide may be methylated to form 5-methylcytosine"
ccacaagtcaaaacgcgctttcactctgtctcggcatactctgcttccctgtaacacaggcggtggaaattccagatcggaaagatacacgaccgtatttcactcccatgcggattgctata

SEQ ID NO: 4402 - DNA, 122 bp, Homo sapiens
  misc_feature (61)..(62): /note="This region represents a CpG dinucleotide"
  misc_feature (61)..(61): /note="Nucleotide may be methylated to form 5-methylcytosine"
gttccaagaaagcaaactttgaaactggccagcaagcttgtaagagcctaatgacgatcgcggcatgagtttccatcagcttttggtgttattttaatacaatccaaatgtagacttaagct

SEQ ID NO: 4403 - DNA, 122 bp, Homo sapiens
  misc_feature (61)..(62): /note="This region represents a CpG dinucleotide"
  misc_feature (61)..(61): /note="Nucleotide may be methylated to form 5-methylcytosine"
cattccaagttacacgatctgacaagacatggagcgacctgagtttgcgtgtttctaacacgttggcttgaatccagcatgtgctggtgctggctgtgtcctgatgtggcagtgagagctgc

SEQ ID NO: 4404 - DNA, 122 bp, Homo sapiens
  misc_feature (61)..(62): /note="This region represents a CpG dinucleotide"
  misc_feature (61)..(61): /note="Nucleotide may be methylated to form 5-methylcytosine"
tggagttttcaactcttaaacaggccatgtaagtcatttatttgttcagccagcatttagcgagatcgttctgttttagcattgctacatattaggactacatggatgattcagatggaatt

SEQ ID NO: 4405 - DNA, 122 bp, Homo sapiens
  misc_feature (61)..(62): /note="This region represents a CpG dinucleotide"
  misc_feature (61)..(61): /note="Nucleotide may be methylated to form 5-methylcytosine"
agcattgcatggagtctgtaactccctggggagggcccgtgactttcattagattctcaacggtatccaaggccaaaaaagaaaaaaaaaaaaaaccactgagtgaaagccaagcagcactc

SEQ ID NO: 4406 - DNA, 122 bp, Homo sapiens
  misc_feature (61)..(62): /note="This region represents a CpG dinucleotide"
  misc_feature (61)..(61): /note="Nucleotide may be methylated to form 5-methylcytosine"
ctggccttctgcccacaggctccatcatactatgatagtgaactctctgcattatagttgcgctttttagaacagtaatgatccaaaagaaaaggatctaccagcattactttaattatatt

SEQ ID NO: 4407 - DNA, 122 bp, Homo sapiens
  misc_feature (61)..(62): /note="This region represents a CpG dinucleotide"
  misc_feature (61)..(61): /note="Nucleotide may be methylated to form 5-methylcytosine"
ttcattagtaacatccatccacaatttacaatccatataaattaacacaaaaattgttatcgtacatttggatactgaaacttaaatttattttaatatgaacttctttctaacaaaagact

SEQ ID NO: 4408 - DNA, 122 bp, Homo sapiens
  misc_feature (61)..(62): /note="This region represents a CpG dinucleotide"
  misc_feature (61)..(61): /note="Nucleotide may be methylated to form 5-methylcytosine"
ctcctggcctcaagtgatccacccacctcagcctcccaaagtacagggattataggcgtgcgccactgtgcccggccgagaacaatttgtcacaagcttacttttctagttttgccaatgca

SEQ ID NO: 4409 - DNA, 122 bp, Homo sapiens
  misc_feature (61)..(62): /note="This region represents a CpG dinucleotide"
  misc_feature (61)..(61): /note="Nucleotide may be methylated to form 5-methylcytosine"
agagtctccagcgagactcagtctaaaaaaaaatatatatattttgagacagtctccctccgtcatccagcctggagccaactgctgcgatcttggctcactgcaacctctgcctcccagat

SEQ ID NO: 4410 - DNA, 122 bp, Homo sapiens
  misc_feature (61)..(62): /note="This region represents a CpG dinucleotide"
  misc_feature (61)..(61): /note="Nucleotide may be methylated to form 5-methylcytosine"
tgccatgaggcatgactctcatgaggacagtcaagcagacctgctaagaggtgcatacagcgagaaactgaggcctcttgccatcagatcatgtgagtgagccctcttggaagcaaatccta

SEQ ID NO: 4411 - DNA, 122 bp, Homo sapiens
  misc_feature (61)..(62): /note="This region represents a CpG dinucleotide"
  misc_feature (61)..(61): /note="Nucleotide may be methylated to form 5-methylcytosine"
ttcatgcttctgcacctgtccttccctcttcttggaatactcttttcaactttagtatctcgtgatttttaaaaggtgcttttaaaaaggactctccaaccatgggcccttcctgacctgtt

SEQ ID NO: 4412 - DNA, 122 bp, Homo sapiens
  misc_feature (61)..(62): /note="This region represents a CpG dinucleotide"
  misc_feature (61)..(61): /note="Nucleotide may be methylated to form 5-methylcytosine"
ccaattaaggatggctgtgggacaggacaaggcagcaaccaatcaaagcccggaaaaccccgcctttgtccttggaaacacattctgatacttttgtttatgatatttaaagaaccagatta

SEQ ID NO: 4413 - DNA, 122 bp, Homo sapiens
  misc_feature (61)..(62): /note="This region represents a CpG dinucleotide"
  misc_feature (61)..(61): /note="Nucleotide may be methylated to form 5-methylcytosine"
aaaggctaagccaggccaggtgcagtggctcacatctgtaatctcagcgattgggaggcccgaggagggagtatcgcttgagcccaggagctggagaccagcctgggcaacatggcgacacc

SEQ ID NO: 4414 - DNA, 122 bp, Homo sapiens
  misc_feature (61)..(62): /note="This region represents a CpG dinucleotide"
  misc_feature (61)..(61): /note="Nucleotide may be methylated to form 5-methylcytosine"
agagtggaagtagagtagggtagagcagagtagaagtagaacatacctgctggcacagggcgggcagcaacacagatgagctagattgcccaataaacccctgagagattctgcactggaaa

SEQ ID NO: 4415 - DNA, 122 bp, Homo sapiens
  misc_feature (61)..(62): /note="This region represents a CpG dinucleotide"
  misc_feature (61)..(61): /note="Nucleotide may be methylated to form 5-methylcytosine"
agtagcctctttcatcaaggggaaggtaacataacagaaatgcatcttcactaaaagttccgctagactggagtggacctgttttattgggcactccatctggcatgtagtaggcactaggt

SEQ ID NO: 4416 - DNA, 122 bp, Homo sapiens
  misc_feature (61)..(62): /note="This region represents a CpG dinucleotide"
  misc_feature (61)..(61): /note="Nucleotide may be methylated to form 5-methylcytosine"
atttgaagaatgtaccttctttagaactatgtctgccagtccagtcatttctgcccatgacggtccagctcagagctgaatcaggtttgccaaggtcaaggaacaagttccctggctccagc

SEQ ID NO: 4417 - DNA, 122 bp, Homo sapiens
  misc_feature (61)..(62): /note="This region represents a CpG dinucleotide"
  misc_feature (61)..(61): /note="Nucleotide may be methylated to form 5-methylcytosine"
tttgcctctttcttggaacacaggatagaggtcaggcttctgattccggagtcagatggccgagttcagtcttggccatgccactcctagctagatgaccttgggcaaatcacgtgacctcc

SEQ ID NO: 4418 - DNA, 122 bp, Homo sapiens
  misc_feature (61)..(62): /note="This region represents a CpG dinucleotide"
  misc_feature (61)..(61): /note="Nucleotide may be methylated to form 5-methylcytosine"
caagcccctttatatcttatgtagcagcttttcttagatagaggagggtcccatgttgtccgcagtgggctccaacttgtggttggcccctcgagtgatctgttttccataataataaaaat

SEQ ID NO: 4419 - DNA, 122 bp, Homo sapiens
  misc_feature (61)..(62): /note="This region represents a CpG dinucleotide"
  misc_feature (61)..(61): /note="Nucleotide may be methylated to form 5-methylcytosine"
cttcatttaaccccagtgactacctaaaaggccgtattcaaatagtcgtattaggccaggcgcagtggctcacgcctgtaattctagcactttgggaagccgaggcagatggattgcctgag

SEQ ID NO: 4420 - DNA, 122 bp, Homo sapiens
  misc_feature (61)..(62): /note="This region represents a CpG dinucleotide"
  misc_feature (61)..(61): /note="Nucleotide may be methylated to form 5-methylcytosine"
tctttgtcaagtccacaccctaaactgttggagtgcctgcatattgcatgggagtaagcacgcatacagtgagccagcatgcagtaagccttcagtaaagtttgctgaataaagctgagggg

SEQ ID NO: 4421 - DNA, 122 bp, Homo sapiens
  misc_feature (61)..(62): /note="This region represents a CpG dinucleotide"
  misc_feature (61)..(61): /note="Nucleotide may be methylated to form 5-methylcytosine"
ctgactaaagagcccttgggccctgaataatcagcagcggtggccaggccaggtggttcacgctgtgggccttaggtgagactcaaacgtgatggcttcaggtggaacctggcacattcccg

SEQ ID NO: 4422 - DNA, 122 bp, Homo sapiens
  misc_feature (61)..(62): /note="This region represents a CpG dinucleotide"
  misc_feature (61)..(61): /note="Nucleotide may be methylated to form 5-methylcytosine"
gtgaataaaactggagtccaggactttggatccaggcggcagggaggaaggaggcctgaacgagaatccaccagcctgtgctctgggcttaggtcactaagaggaatgaaggctgccacttt

SEQ ID NO: 4423 - DNA, 122 bp, Homo sapiens
  misc_feature (61)..(62): /note="This region represents a CpG dinucleotide"
  misc_feature (61)..(61): /note="Nucleotide may be methylated to form 5-methylcytosine"
acagacagcctcttttgcaaccctcctggttaggggtaatgtgaccgggcactcatttgccgcgtgtagcccctgacttgcacacattttcaactcgttggtctgtggtctgtgttcctgtg

SEQ ID NO: 4424 - DNA, 122 bp, Homo sapiens
  misc_feature (61)..(62): /note="This region represents a CpG dinucleotide"
  misc_feature (61)..(61): /note="Nucleotide may be methylated to form 5-methylcytosine"
gtgttaacaactcgccattggagagatccttaaccttttactatctttgtgctggacactcgagtggaaaaatcaaaggcaatggggctcacagacctgcactgtttttacggtagatcaga

SEQ ID NO: 4425 - DNA, 122 bp, Homo sapiens
  misc_feature (61)..(62): /note="This region represents a CpG dinucleotide"
  misc_feature (61)..(61): /note="Nucleotide may be methylated to form 5-methylcytosine"
ctctagacgtttttattctctccttgctgctgcaaaattaggtttgcacaactctgagaccgtcataatggagcaggtctgtctcatttacaggcatttgccgcactcattagcaaatgcct

SEQ ID NO: 4426 - DNA, 122 bp, Homo sapiens
  misc_feature (61)..(62): /note="This region represents a CpG dinucleotide"
  misc_feature (61)..(61): /note="Nucleotide may be methylated to form 5-methylcytosine"
tttctgaaatttgttaccaggtgaactctgtgtaggcaagtatggaggctcttctaattacggattacaagcaagaatgactacctagatcagagttgatataagcgatgcccaaccattca

SEQ ID NO: 4427 - DNA, 122 bp, Homo sapiens
  misc_feature (61)..(62): /note="This region represents a CpG dinucleotide"
  misc_feature (61)..(61): /note="Nucleotide may be methylated to form 5-methylcytosine"
ccccttcaccttctgccatgattggaagcttcctgagtccccatcagaagcagatgctggcgcatgcttctcatccagcctgtggaaccatgagccaaaataaacctctttaccttataaat

SEQ ID NO: 4428 - DNA, 122 bp, Homo sapiens
  misc_feature (61)..(62): /note="This region represents a CpG dinucleotide"
  misc_feature (61)..(61): /note="Nucleotide may be methylated to form 5-methylcytosine"
cttatactggggttttttatgagcaccaatggattccacgggtttctatccaagccacagcgacaaattattctcctggtgactgaattagaagttgacagtaagttggaagaatgcctttg

SEQ ID NO: 4429 - DNA, 122 bp, Homo sapiens
  misc_feature (61)..(62): /note="This region represents a CpG dinucleotide"
  misc_feature (61)..(61): /note="Nucleotide may be methylated to form 5-methylcytosine"
tctattaaaaatcaattatattatttgtgagagaagttttttttttttctttttgaaatacgtaaaataaagctggctggcttcttgaattttagtagtgcattgtggaaataacacaggct

SEQ ID NO: 4430 - DNA, 122 bp, Homo sapiens
  misc_feature (61)..(62): /note="This region represents a CpG dinucleotide"
  misc_feature (61)..(61): /note="Nucleotide may be methylated to form 5-methylcytosine"
ctaatgagattgctcccgcaaagctccctaagatagagatagcgatttcagaccctgaggcgttgttcctgacttgtcctgatgttcactgtcagccggtaactcctgggacctcgtaaagt

SEQ ID NO: 4431 - DNA, 122 bp, Homo sapiens
  misc_feature (61)..(62): /note="This region represents a CpG dinucleotide"
  misc_feature (61)..(61): /note="Nucleotide may be methylated to form 5-methylcytosine"
tgctgtcaatttagtttacctggtgtcttagtccattttctgttgctataaacagaataccgcattctagataataaacagaaatgtatttgactcatagttctggaagggggtcatcccat

SEQ ID NO: 4432 - DNA, 122 bp, Homo sapiens
  misc_feature (61)..(62): /note="This region represents a CpG dinucleotide"
  misc_feature (61)..(61): /note="Nucleotide may be methylated to form 5-methylcytosine"
gactcaccacagcctcctcctaccccggctccctctccgcactcacaagccggctctcagcggggccaccaacaacacccagcggaacccgtcatcttgttccggtccacggcgccccctga

SEQ ID NO: 4433 - DNA, 122 bp, Homo sapiens
  misc_feature (61)..(62): /note="This region represents a CpG dinucleotide"
  misc_feature (61)..(61): /note="Nucleotide may be methylated to form 5-methylcytosine"
gcggacacaggcacattcaagcttgaggcagagtggagcacaggaaagaacatatgggtgcgttcatcccagccttgtggattcctaatgccagctttgtcactcagtagtatgtgacttta

SEQ ID NO: 4434 - DNA, 122 bp, Homo sapiens
  misc_feature (61)..(62): /note="This region represents a CpG dinucleotide"
  misc_feature (61)..(61): /note="Nucleotide may be methylated to form 5-methylcytosine"
agtcatgtctgagtcagtttttaatctaaagaagctgagcttctgctttatctttgacctcgttctattttttctcctgcttcagttgccaaaggttacagtaatgcatgtgccaaattggt

SEQ ID NO: 4435 - DNA, 122 bp, Homo sapiens
  misc_feature (61)..(62): /note="This region represents a CpG dinucleotide"
  misc_feature (61)..(61): /note="Nucleotide may be methylated to form 5-methylcytosine"
catcttagtgctgtgagcttgggtcacaaatctctctgctattccagtgtgtgacatcttcgctcgtttgccgctgctcattaacaaacaatactgctgtgaaattggtttaatgacaaagt

SEQ ID NO: 4436 - DNA, 122 bp, Homo sapiens
  misc_feature (61)..(62): /note="This region represents a CpG dinucleotide"
  misc_feature (61)..(61): /note="Nucleotide may be methylated to form 5-methylcytosine"
aacacagaatataatacatataacacacacaatatgtgtgaatcgactatgttatcactacggcttttgtcaacagtaagctattagtagttaagttttggaggagtcaaaagttatatata

SEQ ID NO: 4437 - DNA, 122 bp, Homo sapiens
  misc_feature (61)..(62): /note="This region represents a CpG dinucleotide"
  misc_feature (61)..(61): /note="Nucleotide may be methylated to form 5-methylcytosine"
atctaccctgagccagaattccagaactggttcccctcctcatccatgatgaagacgctgcggctcatgtggtcacaaaggcttggtgtttcctatgtggagataccattgctgttctacct

SEQ ID NO: 4438 - DNA, 122 bp, Homo sapiens
  misc_feature (61)..(62): /note="This region represents a CpG dinucleotide"
  misc_feature (61)..(61): /note="Nucleotide may be methylated to form 5-methylcytosine"
tgagtagtgggcagggaagaagccagcctgggcctgggctccttggggagacaggactaacgctggagcctgggccactgcaggcctgtgatctggaacccagcaaagcctcatcaccctgc

SEQ ID NO: 4439 - DNA, 122 bp, Homo sapiens
  misc_feature (61)..(62): /note="This region represents a CpG dinucleotide"
  misc_feature (61)..(61): /note="Nucleotide may be methylated to form 5-methylcytosine"
ttgtctgattttataggagaatcttcttctgaactgtttggtgcttcagatctaagacaacgcttaattctttttaaaactggtgaaacaggttctgtttgccttctctcacaattttctat

SEQ ID NO: 4440 - DNA, 122 bp, Homo sapiens
  misc_feature (61)..(62): /note="This region represents a CpG dinucleotide"
  misc_feature (61)..(61): /note="Nucleotide may be methylated to form 5-methylcytosine"
aattattgtcttcagggagttctctagaggctgcgggcgtgcactgctcaaatccacttgcgtgagaagctcatgaggagggtagttagctgacagtttccagctgcggcccctctggctct

SEQ ID NO: 4441 - DNA, 122 bp, Homo sapiens
  misc_feature (61)..(62): /note="This region represents a CpG dinucleotide"
  misc_feature (61)..(61): /note="Nucleotide may be methylated to form 5-methylcytosine"
aaggcatccaacgtacacgacctgacttctcactcccatttataaagccggtgatacagtcggattctaacccccattccacaggggaggaaactgaggctcaaagaaacaaatcgtaagtc

SEQ ID NO: 4442 - DNA, 122 bp, Homo sapiens
  misc_feature (61)..(62): /note="This region represents a CpG dinucleotide"
  misc_feature (61)..(61): /note="Nucleotide may be methylated to form 5-methylcytosine"
ttctttaaagtagtatggtggaagatatccagctacattcagagcatgctttttaatttgcggttttgagcagccagattcttgaaggaatcctagctttggacttataaacaatgaaggaa

SEQ ID NO: 4443 - DNA, 122 bp, Homo sapiens
  misc_feature (61)..(62): /note="This region represents a CpG dinucleotide"
  misc_feature (61)..(61): /note="Nucleotide may be methylated to form 5-methylcytosine"
tcaccaaaacaagtcatatggctgatcacatagagagagagagagggctgcacagttgcacggcaaagggtaagagtgcaagagatttgaaaaattgagactatttttgtaacctaccacag

SEQ ID NO: 4444 - DNA, 122 bp, Homo sapiens
  misc_feature (61)..(62): /note="This region represents a CpG dinucleotide"
  misc_feature (61)..(61): /note="Nucleotide may be methylated to form 5-methylcytosine"
accagccatgccaacaccttgatctcagacttctaacctccaaaactgtgagaaaacgaacgcctattgttaagttgcccagcctgtggtattttgttacggaagcctgagcaaactaacac

SEQ ID NO: 4445 - DNA, 122 bp, Homo sapiens
  misc_feature (61)..(62): /note="This region represents a CpG dinucleotide"
  misc_feature (61)..(61): /note="Nucleotide may be methylated to form 5-methylcytosine"
gcaagagcagctgtcattgcttttttcctggtcttagagggatcatgtgcaattaggatccgtcaagtatgatgctagctgtagagttgttcgatgtgctttctgtcagattgaggaaattc

SEQ ID NO: 4446 - DNA, 122 bp, Homo sapiens
  misc_feature (61)..(62): /note="This region represents a CpG dinucleotide"
  misc_feature (61)..(61): /note="Nucleotide may be methylated to form 5-methylcytosine"
tccagagggctcatttggagaatagctctacaaattccccgggaaagcattccctcaagtcgtttcaggacatgggagctcaggagtttggctaaggttcaaaagcactaaataatttgttc

SEQ ID NO: 4447 - DNA, 122 bp, Homo sapiens
  misc_feature (61)..(62): /note="This region represents a CpG dinucleotide"
  misc_feature (61)..(61): /note="Nucleotide may be methylated to form 5-methylcytosine"
gggaaattccttgtggacaaagaactcaaagccatcccctctgttcacctaagacaaatgcgtatctgattgcttcctctgccctgttgttttgctaagccagactgaggcataaatgacta

SEQ ID NO: 4448 - DNA, 122 bp, Homo sapiens
  misc_feature (61)..(62): /note="This region represents a CpG dinucleotide"
  misc_feature (61)..(61): /note="Nucleotide may be methylated to form 5-methylcytosine"
tatccccctccaccacactgaattcaatcactaagttatagccagagcaatttttctgttcgtgtcattctcttgatcaaaactctttaatagcttcctatttccattaagttaaaatcaaa

SEQ ID NO: 4449 - DNA, 122 bp, Homo sapiens
  misc_feature (61)..(62): /note="This region represents a CpG dinucleotide"
  misc_feature (61)..(61): /note="Nucleotide may be methylated to form 5-methylcytosine"
tgatgtgagatgataaaatgcctacgtgataagatgcagtgaggtgaatgatgcaggcatcgtgacatagtgttaagctactattgacctacatctgaaggacgatcagctgcttcaggtaa

SEQ ID NO: 4450 - DNA, 122 bp, Homo sapiens
  misc_feature (61)..(62): /note="This region represents a CpG dinucleotide"
  misc_feature (61)..(61): /note="Nucleotide may be methylated to form 5-methylcytosine"
aatcacagctcactgtcagtcagaggttttgcaattgaattaatgcacatttctctcttacgcagcaattcccctttaattcttagtcttctcactcgcttttaaaagaattttatttctgc

SEQ ID NO: 4451 - DNA, 122 bp, Homo sapiens
  misc_feature (61)..(62): /note="This region represents a CpG dinucleotide"
  misc_feature (61)..(61): /note="Nucleotide may be methylated to form 5-methylcytosine"
acaacagaaggttgagtcatgagtgcataccgcatccaggccaggctttgcttccaagcacgaagtagaccatggcgttgggttgacgttttcacattgtaaccgtaaattctctgtgaccc

SEQ ID NO: 4452 - DNA, 122 bp, Homo sapiens
  misc_feature (61)..(62): /note="This region represents a CpG dinucleotide"
  misc_feature (61)..(61): /note="Nucleotide may be methylated to form 5-methylcytosine"
gggccatctgcctctcctcattgtgagtgctgtctcacactcgttgttgttcgtaatggtcgtctttcagtttttattttgtatgtatgtatttatttatattttgcagacagggccttgct

SEQ ID NO: 4453 - DNA, 122 bp, Homo sapiens
  misc_feature (61)..(62): /note="This region represents a CpG dinucleotide"
  misc_feature (61)..(61): /note="Nucleotide may be methylated to form 5-methylcytosine"
aggtgcaaaacaatgaattccaagcctcggaagcaaagaagcttaggatccgacggtggccgcaagatctcatcatggatctgacccctgctcagcgcgcgccatttcgtcgttgccaaacg

SEQ ID NO: 4454 - DNA, 122 bp, Homo sapiens
  misc_feature (61)..(62): /note="This region represents a CpG dinucleotide"
  misc_feature (61)..(61): /note="Nucleotide may be methylated to form 5-methylcytosine"
tagtattctttatctcataagtaagattgtccccatttcacagatgaaggctcagagtgtcgtgaaagttagagcacccaagttgcacgactggcgagtccagagccggctctgtgtgctgt

SEQ ID NO: 4455 - DNA, 122 bp, Homo sapiens
  misc_feature (61)..(62): /note="This region represents a CpG dinucleotide"
  misc_feature (61)..(61): /note="Nucleotide may be methylated to form 5-methylcytosine"
tatctcttttagtcttcacagaaactttacgaggtagttattaatatcatccctacttaacgggtaagaaaactgaggcacagaaaggtcaagtaacttgcccaaggttattcagtcactga

SEQ ID NO: 4456 - DNA, 122 bp, Homo sapiens
  misc_feature (61)..(62): /note="This region represents a CpG dinucleotide"
  misc_feature (61)..(61): /note="Nucleotide may be methylated to form 5-methylcytosine"
ctgttgagagcaaacagtggaagggactcattgtctcacctggggagaaagagcctttggcggatatttcaaagagactctagacagtgtaggaacaaatacaggaacctgccatactggct

SEQ ID NO: 4457 - DNA, 122 bp, Homo sapiens
  misc_feature (61)..(62): /note="This region represents a CpG dinucleotide"
  misc_feature (61)..(61): /note="Nucleotide may be methylated to form 5-methylcytosine"
aatctactcctggtgaagcattgttgaaatgacaacaaaggatttagaatattaaataaacgtagttgataaagcagcagcaggtttgagatgattgactacaattttgaaagaagttctac

SEQ ID NO: 4458 - DNA, 122 bp, Homo sapiens
  misc_feature (61)..(62): /note="This region represents a CpG dinucleotide"
  misc_feature (61)..(61): /note="Nucleotide may be methylated to form 5-methylcytosine"
ttgagaccagcctgggcaacatagtgagacctcatttttacaaaaaatccaaaaattagccgggcctggaggtatgcacctgtagtcccagctactcaggaggttgaggctacagtgagctg

SEQ ID NO: 4459 - DNA, 122 bp, Homo sapiens
  misc_feature (61)..(62): /note="This region represents a CpG dinucleotide"
  misc_feature (61)..(61): /note="Nucleotide may be methylated to form 5-methylcytosine"
gctattctggcagctcaataatgtcgttaagaactcagactcggcagttcccattatcttcgggagctgtggaggtaggaatttaagacaggcccattttattaatttattttcaaatgcaa

SEQ ID NO: 4460 - DNA, 122 bp, Homo sapiens
  misc_feature (61)..(62): /note="This region represents a CpG dinucleotide"
  misc_feature (61)..(61): /note="Nucleotide may be methylated to form 5-methylcytosine"
attctccatgtctttggtctatcagagtcttgcttttacttccatttctgtttccagccacggtgactgagtcacagcaacacaggctgctccaaggcctctgttctctgctgactctgcag

SEQ ID NO: 4461 - DNA, 122 bp, Homo sapiens
  misc_feature (61)..(62): /note="This region represents a CpG dinucleotide"
  misc_feature (61)..(61): /note="Nucleotide may be methylated to form 5-methylcytosine"
cgggcatggactacgcgcaatgccttcagcctgcggtgggctcaggaaccgaggcgctgccgctgctgctgcagtcactaaaggaaagagattggcgagtcagggaatcttccccaatgcca

SEQ ID NO: 4462 - DNA, 122 bp, Homo sapiens
  misc_feature (61)..(62): /note="This region represents a CpG dinucleotide"
  misc_feature (61)..(61): /note="Nucleotide may be methylated to form 5-methylcytosine"
ctataacagtgattctcaaccctggctgaacattagaattacccgaagaatgttttcaaccgtgggtgctggggccgcatctcagacgaattaaatgtagatctactagagaggcgggatcc

SEQ ID NO: 4463 - DNA, 122 bp, Homo sapiens
  misc_feature (61)..(62): /note="This region represents a CpG dinucleotide"
  misc_feature (61)..(61): /note="Nucleotide may be methylated to form 5-methylcytosine"
gcttcaaatccagccataagctgataattgcagttcataagtatgataattgggtgctcacgcatgcgtgtgtgagatgtgtcaccctcaaaccttgttatgacgtcagcacattacccgtc

SEQ ID NO: 4464 - DNA, 122 bp, Homo sapiens
  misc_feature (61)..(62): /note="This region represents a CpG dinucleotide"
  misc_feature (61)..(61): /note="Nucleotide may be methylated to form 5-methylcytosine"
agggttagagctgggttccaatgctgcctcccttactgtagttctgcatcagttgtgtggcgtcgagcagattgcttcacttctctgggtctgttttctcattttgcaaatggggcaatact

SEQ ID NO: 4465 - DNA, 122 bp, Homo sapiens
  misc_feature (61)..(62): /note="This region represents a CpG dinucleotide"
  misc_feature (61)..(61): /note="Nucleotide may be methylated to form 5-methylcytosine"
tggggaatccattctgtttcttcctggtgtttaggaagttgccccacacacagattgccccgatgtccaaccagaagaagtgaaactgctgctgggtctggagaggtgaagacccgtggcca

SEQ ID NO: 4466 - DNA, 122 bp, Homo sapiens
  misc_feature (61)..(62): /note="This region represents a CpG dinucleotide"
  misc_feature (61)..(61): /note="Nucleotide may be methylated to form 5-methylcytosine"
cctaaccttatcactcatcaaagaaatgtaaattaaaatgtttatttttcatgactaacacgacataatgtcaggaagtttttagccttaagaaagaacaatggggcaagattcaattctag

SEQ ID NO: 4467 - DNA, 122 bp, Homo sapiens
  misc_feature (61)..(62): /note="This region represents a CpG dinucleotide"
  misc_feature (61)..(61): /note="Nucleotide may be methylated to form 5-methylcytosine"
cgagaatggaataggaagaactagctgcctcacttttcactttcgcgcctacattttcttcgctccctaagttatacaagatgtacatttcctctcttaagcaacttaatttgggtgctact

SEQ ID NO: 4468 - DNA, 122 bp, Homo sapiens
  misc_feature (61)..(62): /note="This region represents a CpG dinucleotide"
  misc_feature (61)..(61): /note="Nucleotide may be methylated to form 5-methylcytosine"
attctgagtgacagcatcggctgcctacagagctctgagaaggactcataaagctcattgcgagttaccgagtacaaaatcgattatcaatgtctgccatgggcagagaatggtaaatggca

SEQ ID NO: 4469 - DNA, 122 bp, Homo sapiens
  misc_feature (61)..(62): /note="This region represents a CpG dinucleotide"
  misc_feature (61)..(61): /note="Nucleotide may be methylated to form 5-methylcytosine"
tttaactgagattttattatgttgacatttgtttctcattccacatcgtctttggccaagcgccagcacttacaagtctctgattaactggtaggggctttgtcagaagcatctggatcact

SEQ ID NO: 4470 - DNA, 122 bp, Homo sapiens
  misc_feature (61)..(62): /note="This region represents a CpG dinucleotide"
  misc_feature (61)..(61): /note="Nucleotide may be methylated to form 5-methylcytosine"
agaagtgtctggcttctgctctgaaagattctgatttattggtctgggatatgacctgagcgatgggatttttagaagtttcccaggtgattataatacgaagccaaggttgagaaccacag

SEQ ID NO: 4471 - DNA, 122 bp, Homo sapiens
  misc_feature (61)..(62): /note="This region represents a CpG dinucleotide"
  misc_feature (61)..(61): /note="Nucleotide may be methylated to form 5-methylcytosine"
cttgatttacagtctagtgaggatttagtcaagttaacaggcaataccttgtaagtgctacgatgtggggcgtgcacagaggactgagggaacacataagattcacatgtcataggttccag

SEQ ID NO: 4472 - DNA, 122 bp, Homo sapiens
  misc_feature (61)..(62): /note="This region represents a CpG dinucleotide"
  misc_feature (61)..(61): /note="Nucleotide may be methylated to form 5-methylcytosine"
tttagtttttatatgttaagactgtatcacaatgtttttatccatcaccctattgatggacgtctagactatgtctagggcttcactgctacaagatggtgctacagtaaacattcttgtgc

SEQ ID NO: 4473 - DNA, 122 bp, Homo sapiens
  misc_feature (61)..(62): /note="This region represents a CpG dinucleotide"
  misc_feature (61)..(61): /note="Nucleotide may be methylated to form 5-methylcytosine"
ttatgtgtcctcccagaattttactcagtcacgttgctcactgctgcgcactcctgcagacgcatcccagtggactctgcgctgcatccccagagtacagcgagtttcccgcctcccgttag

SEQ ID NO: 4474 - DNA, 122 bp, Homo sapiens
  misc_feature (61)..(62): /note="This region represents a CpG dinucleotide"
  misc_feature (61)..(61): /note="Nucleotide may be methylated to form 5-methylcytosine"
caggaagaggctgctttagtgatgagtgtggcagaggaggagctgtctcatactagcctgcggatttcctttatggagtaaatcctttaagattcttctcaagagctgggcgcagtgtctta

SEQ ID NO: 4475 - DNA, 122 bp, Homo sapiens
  misc_feature (61)..(62): /note="This region represents a CpG dinucleotide"
  misc_feature (61)..(61): /note="Nucleotide may be methylated to form 5-methylcytosine"
tgaattctgctgtgtttgcctcctcattctttctactttcttttgtcatgataacatcagcgttgcctgtcttcctattaaatcgcatctctcctcattaatctttctctcttagccaatga

SEQ ID NO: 4476 - DNA, 122 bp, Homo sapiens
  misc_feature (61)..(62): /note="This region represents a CpG dinucleotide"
  misc_feature (61)..(61): /note="Nucleotide may be methylated to form 5-methylcytosine"
ctcaggtgatccacccgcctcggcctcccaaagtgctgggattacaggcatgagccactgcgcccggccgtagtcaacagtttagagtcaacagccccagctgtcactcacaagtgtcattc

SEQ ID NO: 4477 - DNA, 122 bp, Homo sapiens
  misc_feature (61)..(62): /note="This region represents a CpG dinucleotide"
  misc_feature (61)..(61): /note="Nucleotide may be methylated to form 5-methylcytosine"
ttgataattcttttcttccataaggaaaaaatggctgatttttgaaagccgagcacttagcgctgggctcagtacatgtttactgaaagaaaaaggttgagttttatagcccaaaggtagtg

SEQ ID NO: 4478 - DNA, 122 bp, Homo sapiens
  misc_feature (61)..(62): /note="This region represents a CpG dinucleotide"
  misc_feature (61)..(61): /note="Nucleotide may be methylated to form 5-methylcytosine"
ctgacttcatccctctggtttcctgttgagccctctggaatgcatgtttccctgcagtgacgcatagtcagggaaggcaggcgctggggccgtgccctgactgagtgtgaggtaagggctct

SEQ ID NO: 4479 - DNA, 122 bp, Homo sapiens
  misc_feature (61)..(62): /note="This region represents a CpG dinucleotide"
  misc_feature (61)..(61): /note="Nucleotide may be methylated to form 5-methylcytosine"
tatggcctattgttgctgcacacccctcgttaatacacatgctgcccggggcagaccctgcgaatgacatcagcttgcttatcttagaaacctacgaacctgacgcagggtgctgaggttgt

SEQ ID NO: 4480 - DNA, 122 bp, Homo sapiens
  misc_feature (61)..(62): /note="This region represents a CpG dinucleotide"
  misc_feature (61)..(61): /note="Nucleotide may be methylated to form 5-methylcytosine"
tctttgtttttaatatacagttcatcatcctttacataacttcatctttaatgctggctgcgtttaaccactggctctctgtttaacagctgacttacctgctcctgtccatcactgttgtt

SEQ ID NO: 4481 - DNA, 122 bp, Homo sapiens
  misc_feature (61)..(62): /note="This region represents a CpG dinucleotide"
  misc_feature (61)..(61): /note="Nucleotide may be methylated to form 5-methylcytosine"
caggaagcgctgagccgccaaatgcgaggcacacacggggcacgggaggagccgggagagcgcaaccaccgaccacagagcagcccgcatatgaacaggcacgcaatgagtcccttcaaagg

SEQ ID NO: 4482 - DNA, 122 bp, Homo sapiens
  misc_feature (61)..(62): /note="This region represents a CpG dinucleotide"
  misc_feature (61)..(61): /note="Nucleotide may be methylated to form 5-methylcytosine"
ttcgaaaataaaaatccaagtgcctatctcttgcatttccagttggtagtttcctatcatcgggtttgcctgttcacacaagtctttgcggcacaacggagtctgacttcccccaaattaat

SEQ ID NO: 4483 - DNA, 122 bp, Homo sapiens
  misc_feature (61)..(62): /note="This region represents a CpG dinucleotide"
  misc_feature (61)..(61): /note="Nucleotide may be methylated to form 5-methylcytosine"
gcccatgcggtggccacagcctcgggtgagttccggttccaaagtaccggctctcccttacgatcaagtgttcgaatgtgcttgaagcattccagacacaccaaggcctggacctgacttca

SEQ ID NO: 4484 - DNA, 122 bp, Homo sapiens
  misc_feature (61)..(62): /note="This region represents a CpG dinucleotide"
  misc_feature (61)..(61): /note="Nucleotide may be methylated to form 5-methylcytosine"
ccctgccaaacatcacattcacgtcatcatgcttggactgtttgtcttctcattgatattcggccagttcctgcagagcagtggcatttatactgggttgcctggctatatcatattatagg

SEQ ID NO: 4485 - DNA, 122 bp, Homo sapiens
  misc_feature (61)..(62): /note="This region represents a CpG dinucleotide"
  misc_feature (61)..(61): /note="Nucleotide may be methylated to form 5-methylcytosine"
taccttgaactctttctcaatattggccagaactgccagttcattgctaagttctaaagccgtcatgactggatcttcactagacaatgacaggtaagccggacttgccaggcctttatagg

SEQ ID NO: 4486 - DNA, 122 bp, Homo sapiens
  misc_feature (61)..(62): /note="This region represents a CpG dinucleotide"
  misc_feature (61)..(61): /note="Nucleotide may be methylated to form 5-methylcytosine"
tcattcttcctgttgcttaggctagaagatatgggtccttatgatattatgtggaaatagcggtgatggtatgataaaaatcgtgtaatgaaagtacagttagcagatgatgaaattaagta

SEQ ID NO: 4487 - DNA, 122 bp, Homo sapiens
  misc_feature (61)..(62): /note="This region represents a CpG dinucleotide"
  misc_feature (61)..(61): /note="Nucleotide may be methylated to form 5-methylcytosine"
tcagtcactcagttgtacaggctgctatgcgggcctttatctgataacaatgcacttcaccgtagttacaaaggtactttttcgaagaaaataggataatttggcctttgaacaggatttct

SEQ ID NO: 4488 - DNA, 122 bp, Homo sapiens
  misc_feature (61)..(62): /note="This region represents a CpG dinucleotide"
  misc_feature (61)..(61): /note="Nucleotide may be methylated to form 5-methylcytosine"
gggtttagctgtcttgagggctggtgcctgttctgttcattcagcttccctctgatgatgcgtggcagagtgtgggaggacacgtgcctagcatttttacaatatgccttttcttttagccc

SEQ ID NO: 4489 - DNA, 122 bp, Homo sapiens
  misc_feature (61)..(62): /note="This region represents a CpG dinucleotide"
  misc_feature (61)..(61): /note="Nucleotide may be methylated to form 5-methylcytosine"
atccagggacctacacctaggcactgagacatgtgactggggaaaaatggcctacacttacgccctaatgtgttagttccgcaatttcctgctgaggttagcagatgaacgtccagcaagtc

SEQ ID NO: 4490 - DNA, 122 bp, Homo sapiens
  misc_feature (61)..(62): /note="This region represents a CpG dinucleotide"
  misc_feature (61)..(61): /note="Nucleotide may be methylated to form 5-methylcytosine"
gtttgacactcacaacatctgtgtgaggtggggcctgtcactctcccagttagatgatgacgctgaagttcagagagctttgctggcactgcttgagaggaagggccaaccccggctttgag

SEQ ID NO: 4491 - DNA, 122 bp, Homo sapiens
  misc_feature (61)..(62): /note="This region represents a CpG dinucleotide"
  misc_feature (61)..(61): /note="Nucleotide may be methylated to form 5-methylcytosine"
gtacctggcactatttcctagccatctgccagttgtgtagtaagcctgagtcagaggctgcgaatagcttagtgagaatgtttaaattatagtggtagtaagcataatgaggcagaagagca

SEQ ID NO: 4492 - DNA, 122 bp, Homo sapiens
  misc_feature (61)..(62): /note="This region represents a CpG dinucleotide"
  misc_feature (61)..(61): /note="Nucleotide may be methylated to form 5-methylcytosine"
gcagctgtttataacccttaagtcatgactcttccacctgtctgggtaaatctatccatgcgacaaatgcagacacacttggaggattcaggaatgatggtttacaagatcataataggaaa

SEQ ID NO: 4493 - DNA, 122 bp, Homo sapiens
  misc_feature (61)..(62): /note="This region represents a CpG dinucleotide"
  misc_feature (61)..(61): /note="Nucleotide may be methylated to form 5-methylcytosine"
cccaagcaaacctcccacctcagcctcccgagtatctgggatcacaggcatgtgccaccacgcctgactaatttaaaaaacttttttgtacagatggggtcttgctatgtggcccaggctgg

SEQ ID NO: 4494 - DNA, 122 bp, Homo sapiens
  misc_feature (61)..(62): /note="This region represents a CpG dinucleotide"
  misc_feature (61)..(61): /note="Nucleotide may be methylated to form 5-methylcytosine"
tttttgtgttttacagatactgcactttttacaaattgaatgtttgtggcaagcctgcatcgagaaagtccattgatgccatttttttcaaacagtatgtgctcatttcatttctttgtgtc

SEQ ID NO: 4495 - DNA, 122 bp, Homo sapiens
  misc_feature (61)..(62): /note="This region represents a CpG dinucleotide"
  misc_feature (61)..(61): /note="Nucleotide may be methylated to form 5-methylcytosine"
catgggtgactggctggtatgcaaacctttggccactgtgctgtctgtcatcaagccaggcgcatccacttagggtttgtaaggattcatggagatgtgctaatgacagcaaactaggagcc

SEQ ID NO: 4496 - DNA, 122 bp, Homo sapiens
  misc_feature (61)..(62): /note="This region represents a CpG dinucleotide"
  misc_feature (61)..(61): /note="Nucleotide may be methylated to form 5-methylcytosine"
catactactgttttttgtttttgttctttatgagagacggtcttactgtctctcccaggccggagtgctgtgacaccatcagaactctgtgcagccttggctcaagtcatcatcctggctca

SEQ ID NO: 4497 - DNA, 122 bp, Homo sapiens
  misc_feature (61)..(62): /note="This region represents a CpG dinucleotide"
  misc_feature (61)..(61): /note="Nucleotide may be methylated to form 5-methylcytosine"
agagggatgagctcatctctggatcccaagagacagccccaccccaaccttctaggagaccggaatcaagttcttgactcatctgaattcatatgcttcaatggaacctgcagtcgagtagc

SEQ ID NO: 4498 - DNA, 122 bp, Homo sapiens
  misc_feature (61)..(62): /note="This region represents a CpG dinucleotide"
  misc_feature (61)..(61): /note="Nucleotide may be methylated to form 5-methylcytosine"
gattatgaaggcagagaagtcttaccatctgctgtctgcgagctggacacccaggaaagccggtggtgtagtctgaaggctggagagccagagagctgacagtgtagattgcactctaagct

SEQ ID NO: 4499 - DNA, 122 bp, Homo sapiens
  misc_feature (61)..(62): /note="This region represents a CpG dinucleotide"
  misc_feature (61)..(61): /note="Nucleotide may be methylated to form 5-methylcytosine"
gcctgcagcagcatgcagtgagaacattcgggatttccttttgagaatgtcaagtcatcacggacagcggctcatgagtcagacctcaccccgtgtatcatcgtcagaacaccatccatggt

SEQ ID NO: 4500 - DNA, 122 bp, Homo sapiens
  misc_feature (61)..(62): /note="This region represents a CpG dinucleotide"
  misc_feature (61)..(61): /note="Nucleotide may be methylated to form 5-methylcytosine"
gcccattattctaggtcctaatctgtttggtggagttgttactccacttctctgaccttgcgcgtagggcctgggcactcctaggaattaggggcagggtggggttagggctgaaacccatt

SEQ ID NO: 4501 - DNA, 122 bp, Homo sapiens
  misc_feature (61)..(62): /note="This region represents a CpG dinucleotide"
  misc_feature (61)..(61): /note="Nucleotide may be methylated to form 5-methylcytosine"
gcatgttattttcattttcgttacttgagcagcattgacaagcctcagtcttttgcggtccgcagatcatgattcttggctatgcaaacctgaggctgatgcatcctccagcagctgaccac

SEQ ID NO: 4502 - DNA, 122 bp, Homo sapiens
  misc_feature (61)..(62): /note="This region represents a CpG dinucleotide"
  misc_feature (61)..(61): /note="Nucleotide may be methylated to form 5-methylcytosine"
gtgggaaatggtaccacgctttgtggtggagtttccctgtgccctgaatctcttttactacgacagtcttttatctatggagagaacataatccaaaacataatacacaaataatttcccct

SEQ ID NO: 4503 - DNA, 122 bp, Homo sapiens
  misc_feature (61)..(62): /note="This region represents a CpG dinucleotide"
  misc_feature (61)..(61): /note="Nucleotide may be methylated to form 5-methylcytosine"
catgcatcaagggcctaaggatacataatagagccttgattaactcgtctttggtactaccgtaagtactagtgagaggctgcccacccagcatccagttcatccacacactctcctttcta

SEQ ID NO: 4504 - DNA, 122 bp, Homo sapiens
  misc_feature (61)..(62): /note="This region represents a CpG dinucleotide"
  misc_feature (61)..(61): /note="Nucleotide may be methylated to form 5-methylcytosine"
accttagtcctccagttgtgagccacgtgaccatgggacatttgttgttattcacagccccgtgccttaggctcctcgtcttcagcatgaggattataataatgtgtacctcctaggcttga

SEQ ID NO: 4505 - DNA, 122 bp, Homo sapiens
  misc_feature (61)..(62): /note="This region represents a CpG dinucleotide"
  misc_feature (61)..(61): /note="Nucleotide may be methylated to form 5-methylcytosine"
cctccagtactttgctgctcaagtttcaggagctgtttttcaagttttgaggtgtttactcgatgcatcatcagaaactggccattcaagtgaaagacaggaatatcaaatttatacctttc

SEQ ID NO: 4506 - DNA, 122 bp, Homo sapiens
  misc_feature (61)..(62): /note="This region represents a CpG dinucleotide"
  misc_feature (61)..(61): /note="Nucleotide may be methylated to form 5-methylcytosine"
agagcctgcaggaaggaaaagaaaattatgccagcataatgcacttacgagaaatagatacgtgcggtgcagggagaaatgctttgatattaaaatttttgtaacttaaaaaggcatgaaaa

SEQ ID NO: 4507 - DNA, 122 bp, Homo sapiens
  misc_feature (61)..(62): /note="This region represents a CpG dinucleotide"
  misc_feature (61)..(61): /note="Nucleotide may be methylated to form 5-methylcytosine"
atggatgatatctacaaagcacaaacatatatttagaagcccttcaacagttacaagcagcgtaaaagaggaatgtaaatgtgtccggcaaagactcatttataacaaaacaaccctgaaac

SEQ ID NO: 4508 - DNA, 122 bp, Homo sapiens
  misc_feature (61)..(62): /note="This region represents a CpG dinucleotide"
  misc_feature (61)..(61): /note="Nucleotide may be methylated to form 5-methylcytosine"
cagtaaaatgaaaaccttgcagtaaatgcttcccagtctttattgggctaaaataggccacgtgtgcttttagaaagatggccgcataataacatgtttattgaatgcctttttacctaaca

SEQ ID NO: 4509 - DNA, 122 bp, Homo sapiens
  misc_feature (61)..(62): /note="This region represents a CpG dinucleotide"
  misc_feature (61)..(61): /note="Nucleotide may be methylated to form 5-methylcytosine"
tgagcagacatttctccaaagatatacaaatagccaatacacacatgaaaaggtcctcaacgttattggccattatgtgaatgcaaatcaaaactaaaatgagataccacttcacacccctc

SEQ ID NO: 4510 - DNA, 122 bp, Homo sapiens
  misc_feature (61)..(62): /note="This region represents a CpG dinucleotide"
  misc_feature (61)..(61): /note="Nucleotide may be methylated to form 5-methylcytosine"
tctgctggccaggcctggtggctcatgcctataatcccagcactttgggaggctgagatgcgattcgagaccagtctgggcaacttagaccttgtctctgcaaaagattaaaaaacattagc

SEQ ID NO: 4511 - DNA, 122 bp, Homo sapiens
  misc_feature (61)..(62): /note="This region represents a CpG dinucleotide"
  misc_feature (61)..(61): /note="Nucleotide may be methylated to form 5-methylcytosine"
cattgtggattaaaacaataagaaatccctttcctctcaggctttcaaggccgtgttaatcgggtgtaatttttaatgaacactggctgcttggtacttattcaagacatttcattagaagg

SEQ ID NO: 4512 - DNA, 122 bp, Homo sapiens
  misc_feature (61)..(62): /note="This region represents a CpG dinucleotide"
  misc_feature (61)..(61): /note="Nucleotide may be methylated to form 5-methylcytosine"
tgtttcttctacaagccaaggaaaaccaaaggttgccaggaaaccactggaaactaagaccgaagcaaagattctacccttctgttttataagattaaagattcttttgatgacaggacaca

SEQ ID NO: 4513 - DNA, 122 bp, Homo sapiens
  misc_feature (61)..(62): /note="This region represents a CpG dinucleotide"
  misc_feature (61)..(61): /note="Nucleotide may be methylated to form 5-methylcytosine"
aagggctttcttatggggataaatgtgttttgtcactgaagtttttatttgttctgtcaccgagccaatctttattgcgtgagaagcagaccctgctgtattaaatgtgctgatgggaaacc

SEQ ID NO: 4514 - DNA, 122 bp, Homo sapiens
  misc_feature (61)..(62): /note="This region represents a CpG dinucleotide"
  misc_feature (61)..(61): /note="Nucleotide may be methylated to form 5-methylcytosine"
ttcagtttgagattttattagtctgagtcaagctaaacattagaactaataaagcacaggcgcaattatctccactgttatttctgtaaaatggctgaatggactaaggtgcagtgtgagtc

SEQ ID NO: 4515 - DNA, 122 bp, Homo sapiens
  misc_feature (61)..(62): /note="This region represents a CpG dinucleotide"
  misc_feature (61)..(61): /note="Nucleotide may be methylated to form 5-methylcytosine"
aggggtggacaggtaatcatgtcagcgatgattattggcataaaaaagaaaccttactaacggaaatataagaagacaggcaagattgcattagagagtcataaaagataaggtcaaagagc

SEQ ID NO: 4516 - DNA, 122 bp, Homo sapiens
  misc_feature (61)..(62): /note="This region represents a CpG dinucleotide"
  misc_feature (61)..(61): /note="Nucleotide may be methylated to form 5-methylcytosine"
ccgtattcatctaggcattcaagatctcgtagcaggcacagattgtctagatccagaagtcgtcattctagtatttctcctagcacactaactctgaagagtagcctggcagctgaattgaa

SEQ ID NO: 4517 - DNA, 122 bp, Homo sapiens
  misc_feature (61)..(62): /note="This region represents a CpG dinucleotide"
  misc_feature (61)..(61): /note="Nucleotide may be methylated to form 5-methylcytosine"
taaattaaatttacagtagagcttattcacttttattccaagcagtaaccatggcactcgcgttaaatcattacaagtgcagcagatatattgattactgccaggcctgtcattaccaatct

SEQ ID NO: 4518 - DNA, 122 bp, Homo sapiens
  misc_feature (61)..(62): /note="This region represents a CpG dinucleotide"
  misc_feature (61)..(61): /note="Nucleotide may be methylated to form 5-methylcytosine"
actaactcttcagtccacaagtcattacttaacagatgcacatcaccgtaaataactcatcgtgtcaattctatcaaagtctggaggtgatcattatcaagttcatgcacaggcttttgtgt

SEQ ID NO: 4519 - DNA, 122 bp, Homo sapiens
  misc_feature (61)..(62): /note="This region represents a CpG dinucleotide"
  misc_feature (61)..(61): /note="Nucleotide may be methylated to form 5-methylcytosine"
tgtggattttgatgtatgggaggatcctgcaagcaatcccctgcggataccaaggaacaacgatatatttcttaatttaaagaaatggaaacgctgacattcgattctattttaaaaatttc

SEQ ID NO: 4520 - DNA, 122 bp, Homo sapiens
  misc_feature (61)..(62): /note="This region represents a CpG dinucleotide"
  misc_feature (61)..(61): /note="Nucleotide may be methylated to form 5-methylcytosine"
cttctcttaagggcagtcaggtgcattgggacctaatttctaagcatgtgaatagtgacacgtcgagcttacagcaggccttaggatcaccaggctgactcactgtcatacagattccaact

SEQ ID NO: 4521 - DNA, 122 bp, Homo sapiens
  misc_feature (61)..(62): /note="This region represents a CpG dinucleotide"
  misc_feature (61)..(61): /note="Nucleotide may be methylated to form 5-methylcytosine"
aatgagaatggaagatttcatttggaaatggccctgtgagtacgtgcttattttcagaggcgttccccataactgacagcagtcaatgacttctgattgggcaatggcctggccagccacac

SEQ ID NO: 4522 - DNA, 122 bp, Homo sapiens
  misc_feature (61)..(62): /note="This region represents a CpG dinucleotide"
  misc_feature (61)..(61): /note="Nucleotide may be methylated to form 5-methylcytosine"
tcagatagaatgtgtgggatggtgccctcagaaatgtgcaatggaaaagccataccaaatcggaatgcaaacacgggatgaaagggaatgtgaatcaacacaaaatatgtgtgtatacagac

SEQ ID NO: 4523 - DNA, 122 bp, Homo sapiens
  misc_feature (61)..(62): /note="This region represents a CpG dinucleotide"
  misc_feature (61)..(61): /note="Nucleotide may be methylated to form 5-methylcytosine"
gtccaggcattgcgctcagtccttatcaaccaattcgatacatattaaacctctagtgtacgcgcagctgtgacagatggaagagaaatgaacctgaatttggagtcatgaggcccaggtct

SEQ ID NO: 4524 - DNA, 122 bp, Homo sapiens
  misc_feature (61)..(62): /note="This region represents a CpG dinucleotide"
  misc_feature (61)..(61): /note="Nucleotide may be methylated to form 5-methylcytosine"
gaaggatggagctcgctggggaggagctcacctcggaggggacagtggccaaccagggcgcggcctgggtgggtgggttttaggctgtaagggcgatgcaaaatatgatgttcctcaccgag

SEQ ID NO: 4525 - DNA, 122 bp, Homo sapiens
  misc_feature (61)..(62): /note="This region represents a CpG dinucleotide"
  misc_feature (61)..(61): /note="Nucleotide may be methylated to form 5-methylcytosine"
tttacaccatttatttgcttagcaaatcccttttcatagacagcatgggtaaatatcagccgtatcatctcaaggctgatctttcatcacacattccattacaaattctaaaattagtaggg

SEQ ID NO: 4526 - DNA, 122 bp, Homo sapiens
  misc_feature (61)..(62): /note="This region represents a CpG dinucleotide"
  misc_feature (61)..(61): /note="Nucleotide may be methylated to form 5-methylcytosine"
aggaataaccatgcgtgaatcattgagattggctcagcctcgtcccctgtaaaatgagatcgtatctgtggccctcctacctcacagcaatgcaggagtgatgaaaatgtgaaatcgttagc

SEQ ID NO: 4527 - DNA, 122 bp, Homo sapiens
  misc_feature (61)..(62): /note="This region represents a CpG dinucleotide"
  misc_feature (61)..(61): /note="Nucleotide may be methylated to form 5-methylcytosine"
ttaggatcaccaggctgactcactgtcatacagattccaactacaaaaatcatctgggagcgccctccgaagtgctaggattctgctggctgttttatgaacagctcatactatgaagtgga

SEQ ID NO: 4528 - DNA, 122 bp, Homo sapiens
  misc_feature (61)..(62): /note="This region represents a CpG dinucleotide"
  misc_feature (61)..(61): /note="Nucleotide may be methylated to form 5-methylcytosine"
ggcatctgttgctcttataaggtcacttcctttcttggtcacctcttaggcagaggtggccgctcccattctcttgccccataactcacttgtcatagagcctgcttatctgatacatgttg

SEQ ID NO: 4529 - DNA, 122 bp, Homo sapiens
  misc_feature (61)..(62): /note="This region represents a CpG dinucleotide"
  misc_feature (61)..(61): /note="Nucleotide may be methylated to form 5-methylcytosine"
ggcgcccgcagccccccagccgctgccgcgcccctccctgcgacggtccctccccggggccgccccggctccgcgccgccgactccactgcccctctgactcacaggccatttcctaccagc

SEQ ID NO: 4530 - DNA, 122 bp, Homo sapiens
  misc_feature (61)..(62): /note="This region represents a CpG dinucleotide"
  misc_feature (61)..(61): /note="Nucleotide may be methylated to form 5-methylcytosine"
ccttccccgccctccgcgaggctgcagcccaggctgagcgccgcctcccaggcccagggccgcccctccaagccccaaccccgggtttcatccctggcaagggcgctgctcctccccgaccc

SEQ ID NO: 4531 - DNA, 122 bp, Homo sapiens
  misc_feature (61)..(62): /note="This region represents a CpG dinucleotide"
  misc_feature (61)..(61): /note="Nucleotide may be methylated to form 5-methylcytosine"
gagaaaagcatcaccagccagctttttaaatttttaccacaacctattttgtgatccctacgtgtcatttcttcagtatattttttaaatgttttaaaatatacgaacatggtgagattttt

SEQ ID NO: 4532 - DNA, 122 bp, Homo sapiens
  misc_feature (61)..(62): /note="This region represents a CpG dinucleotide"
  misc_feature (61)..(61): /note="Nucleotide may be methylated to form 5-methylcytosine"
ttccacagaaccagtttgggcagtaggaactcaggcttctggtctgcagtggagcctgttcgcctctaatagccagtttacagcacttgccttagcctgtttcacagacttgtccacttacc

SEQ ID NO: 4533 - DNA, 122 bp, Homo sapiens
  misc_feature (61)..(62): /note="This region represents a CpG dinucleotide"
  misc_feature (61)..(61): /note="Nucleotide may be methylated to form 5-methylcytosine"
cttgaataatttgcagggcaactagcctggtctctgaggatctggtgaagccatcagccacgacacagactgatctgagagccgacgtcagtagtgacatccagccttgtcatatctttgga

SEQ ID NO: 4534 - DNA, 122 bp, Homo sapiens
  misc_feature (61)..(62): /note="This region represents a CpG dinucleotide"
  misc_feature (61)..(61): /note="Nucleotide may be methylated to form 5-methylcytosine"
tagctgcctaaggactgagggaggatctgtgctcagtgaaaaaaaggctgtttgatttgccgtgtttgtcatggacgtggaagagccacctgtcagaaccaggactatattttagctattct

SEQ ID NO: 4535 - DNA, 122 bp, Homo sapiens
  misc_feature (61)..(62): /note="This region represents a CpG dinucleotide"
  misc_feature (61)..(61): /note="Nucleotide may be methylated to form 5-methylcytosine"
aacaaaaagatgtcggtgcacgtgtcactgatgattaagttaacattgcattatctctgacggcattccgaatggcacagggctacagaagaggaacattttacacagccacgctcctgatc

SEQ ID NO: 4536 - DNA, 122 bp, Homo sapiens
  misc_feature (61)..(62): /note="This region represents a CpG dinucleotide"
  misc_feature (61)..(61): /note="Nucleotide may be methylated to form 5-methylcytosine"
cagcagcgggacaagctgaggcagtaccagaagaggatcgcccagcagctggagcgcgagcgcgccctggcccggcagctgctgcgggacggcaggaaggagtgagtggggcccgggcagcg

SEQ ID NO: 4537 - DNA, 122 bp, Homo sapiens
  misc_feature (61)..(62): /note="This region represents a CpG dinucleotide"
  misc_feature (61)..(61): /note="Nucleotide may be methylated to form 5-methylcytosine"
gtggctgctttgtccactagcatgccttaaatcagtatttgatgactaaatgaatgacagcgagagagcaagtaagcagaggagcaggaatcaacacagtccatacttccccacgttgccag

SEQ ID NO: 4538 - DNA, 122 bp, Homo sapiens
  misc_feature (61)..(62): /note="This region represents a CpG dinucleotide"
  misc_feature (61)..(61): /note="Nucleotide may be methylated to form 5-methylcytosine"
attcacatcttcgaggctcgtctgtaagatggggataattcttccttcactggcttgttacgagtatgaatgtagaaaccactgtgaaagtgtaatattagcagcatcagatagaaaaaaga

SEQ ID NO: 4539 - DNA, 122 bp, Homo sapiens
  misc_feature (61)..(62): /note="This region represents a CpG dinucleotide"
  misc_feature (61)..(61): /note="Nucleotide may be methylated to form 5-methylcytosine"
cggcgtgtgctagcccttgtgtgggcagctgggtcaggctcctttcttaagaaaacaatccggctcagggtcctcaccgccctttgttgtcctccccacgaggtgatcagttgaagtctctg

SEQ ID NO: 4540 - DNA, 122 bp, Homo sapiens
  misc_feature (61)..(62): /note="This region represents a CpG dinucleotide"
  misc_feature (61)..(61): /note="Nucleotide may be methylated to form 5-methylcytosine"
atgccagccatttcacagagttgccatgaagatgaaatcattcaagccaaaagtgcctgccgcataatagatgctcaatgtatgtttcttgagcagatacatgtaacttatggcactttaca

SEQ ID NO: 4541 - DNA, 122 bp, Homo sapiens
  misc_feature (61)..(62): /note="This region represents a CpG dinucleotide"
  misc_feature (61)..(61): /note="Nucleotide may be methylated to form 5-methylcytosine"
ggcgcgttcactgcggaattttcgagacaaccctccggtactagaatgcgacagccgctgcggatattttttggcacaaagacaatggtggcagtgccaagccccatggctaaaactactca

SEQ ID NO: 4542 - DNA, 122 bp, Homo sapiens
  misc_feature (61)..(62): /note="This region represents a CpG dinucleotide"
  misc_feature (61)..(61): /note="Nucleotide may be methylated to form 5-methylcytosine"
taatgcactcggtcataacaggaacacatcataccttttcttttattactcttcagttaccgcgcttgaatgcctacagaggttactgtagtaaccagctggcagccaaagctcttcttgat

SEQ ID NO: 4543 - DNA, 122 bp, Homo sapiens
  misc_feature (61)..(62): /note="This region represents a CpG dinucleotide"
  misc_feature (61)..(61): /note="Nucleotide may be methylated to form 5-methylcytosine"
tcactctctagtcaactgcacttgctactaaactgtgattcactggctgttagtggtatccgcatattcaggatgcaacaccctctctagtcaactgctctttccactaaactgtgattcac

SEQ ID NO: 4544 - DNA, 122 bp, Homo sapiens
  misc_feature (61)..(62): /note="This region represents a CpG dinucleotide"
  misc_feature (61)..(61): /note="Nucleotide may be methylated to form 5-methylcytosine"
ccccaggcaagatgtgggtttgttttgggaaagggctgttattgtctttgttctaaactgcggattataaactaagtgcctcccaaagtcagttcagctaatgcccaggaatgaataatgac

SEQ ID NO: 4545 - DNA, 122 bp, Homo sapiens
  misc_feature (61)..(62): /note="This region represents a CpG dinucleotide"
  misc_feature (61)..(61): /note="Nucleotide may be methylated to form 5-methylcytosine"
ctcttagaacgcatgcagggccctgagctggaaggatcccacagctggtttaatgctctgcgattgtcatcttgcaattcttaataactttagaatgaggccctccctacatgttcattgtg

SEQ ID NO: 4546 - DNA, 122 bp, Homo sapiens
  misc_feature (61)..(62): /note="This region represents a CpG dinucleotide"
  misc_feature (61)..(61): /note="Nucleotide may be methylated to form 5-methylcytosine"
tatgaccaaattcacttgaaagtaccaagcatgttgccatttcctggtttaatctaactgcggctcagctttcaaggccaggaaagtaagaagcagacagtttaagttcaaggtcatagagt

SEQ ID NO: 4547 - DNA, 122 bp, Homo sapiens
  misc_feature (61)..(62): /note="This region represents a CpG dinucleotide"
  misc_feature (61)..(61): /note="Nucleotide may be methylated to form 5-methylcytosine"
ttccctctttggctgcccctgaagcctatttccactcaactcctcctctatggatatgttcggacatgtgtaatttatcccagggccctttcggactggagttaatctcacatcctagtcta

SEQ ID NO: 4548 - DNA, 122 bp, Homo sapiens
  misc_feature (61)..(62): /note="This region represents a CpG dinucleotide"
  misc_feature (61)..(61): /note="Nucleotide may be methylated to form 5-methylcytosine"
gaccagccttggcaacatagcaagatcttatatctacaaaaaactttttaaaaatttagccggacatggtgctgtatacctgtagtaccagatccttaggaggctgaggtgggaggattgct

SEQ ID NO: 4549 - DNA, 122 bp, Homo sapiens
  misc_feature (61)..(62): /note="This region represents a CpG dinucleotide"
  misc_feature (61)..(61): /note="Nucleotide may be methylated to form 5-methylcytosine"
cttgttttattttgatacgtgttttctaatagcccattttgtctgttcttgccttcaacccgtcaaactccaaacaatcatgcaaccagagcctctgatgatggccccatctgctgggaacc

SEQ ID NO: 4550 - DNA, 122 bp, Homo sapiens
  misc_feature (61)..(62): /note="This region represents a CpG dinucleotide"
  misc_feature (61)..(61): /note="Nucleotide may be methylated to form 5-methylcytosine"
tgtgcatgactccagtggaatctgcatgcaatgctcagggcagggtttggcgctgcctcacgaagccattacatttctagacaaagaattaacagtttgtagtgagtgggttatctgttatt

SEQ ID NO: 4551 - DNA, 122 bp, Homo sapiens
  misc_feature (61)..(62): /note="This region represents a CpG dinucleotide"
  misc_feature (61)..(61): /note="Nucleotide may be methylated to form 5-methylcytosine"
cagacagccttggtttctatctcagctcaccagtgacttgctatgtcacctctggcaaatcgcttaatctctctgtgcctcattctcttctcctctttaatatgacaataaagataatatgt

SEQ ID NO: 4552 - DNA, 122 bp, Homo sapiens
  misc_feature (61)..(62): /note="This region represents a CpG dinucleotide"
  misc_feature (61)..(61): /note="Nucleotide may be methylated to form 5-methylcytosine"
aaactgtcactagtcagctggctctttttcctatgaaatctatcagtacctttctccatccgttgttctcaatatgaccacagagcctgagtataccaagaaaaccaatattcgcattacag

SEQ ID NO: 4553 - DNA, 122 bp, Homo sapiens
  misc_feature (61)..(62): /note="This region represents a CpG dinucleotide"
  misc_feature (61)..(61): /note="Nucleotide may be methylated to form 5-methylcytosine"
tgggcagatgcctttctttgcttttttctgtttattttcctacaaatcaatgcttaactgcgttgttatcggagcagagcaacaggtgcaaaaaaataactctgctgccaactcaaatgaaa

SEQ ID NO: 4554 - DNA, 122 bp, Homo sapiens
  misc_feature (61)..(62): /note="This region represents a CpG dinucleotide"
  misc_feature (61)..(61): /note="Nucleotide may be methylated to form 5-methylcytosine"
gtgaccctgcgaccctgaagctgttcctgagtaacatggagcggctgctgcatgccaaggcgcatgggtaggaggttcagttcggggaacaccctgcagcccgaggaggaagaacggaacac

SEQ ID NO: 4555 - DNA, 122 bp, Homo sapiens
  misc_feature (61)..(62): /note="This region represents a CpG dinucleotide"
  misc_feature (61)..(61): /note="Nucleotide may be methylated to form 5-methylcytosine"
ttcaggctcctttaacctcagcacatggcttgtacttcaagattaattatggctgcttgacgactggtccgaaggtagtgagttatgtcaattgattgtccacagtcagttacagatcagac

SEQ ID NO: 4556 - DNA, 122 bp, Homo sapiens
  misc_feature (61)..(62): /note="This region represents a CpG dinucleotide"
  misc_feature (61)..(61): /note="Nucleotide may be methylated to form 5-methylcytosine"
ataatatatgtcaaggcgacagaattattttcaagtttgtagacagcaaactccacagcccgtatataactttgtttcagtttctcctacatgaaggagaaatttatctgacatcatctgaa

SEQ ID NO: 4557 - DNA, 122 bp, Homo sapiens
  misc_feature (61)..(62): /note="This region represents a CpG dinucleotide"
  misc_feature (61)..(61): /note="Nucleotide may be methylated to form 5-methylcytosine"
tatgctgctcagcatcccacaatgcacggaagctgcctatgtacagaatatccaggatggcgcggtggctcatgcctataatcccagcactttggaaggccaaggcaggtggattacctgag

SEQ ID NO: 4558 - DNA, 122 bp, Homo sapiens
  misc_feature (61)..(62): /note="This region represents a CpG dinucleotide"
  misc_feature (61)..(61): /note="Nucleotide may be methylated to form 5-methylcytosine"
tacctggcaacggataaacaaatgtgttagggagatgttctattaaggtaagtgagggcacggctctgtagaacatgcctattaactttgagcttaagcgtgctgctattctctagggaaca

SEQ ID NO: 4559 - DNA, 122 bp, Homo sapiens
  misc_feature (61)..(62): /note="This region represents a CpG dinucleotide"
  misc_feature (61)..(61): /note="Nucleotide may be methylated to form 5-methylcytosine"
aatgatttggacagatgtttactaagtttgcctttctaaaattttcttgtacgtggttaacggcaggtgattaatattcatgcaaggaggttttcaccagaatttcatggagttgacatcta

SEQ ID NO: 4560 - DNA, 122 bp, Homo sapiens
  misc_feature (61)..(62): /note="This region represents a CpG dinucleotide"
  misc_feature (61)..(61): /note="Nucleotide may be methylated to form 5-methylcytosine"
tcctaatttcttgccttggctggataactcggctgcaaaaggtaagattctttgctcttccggttttcgggatcagaggtaacccgggggcctagcacaggtggtctcacatctgggaacga

SEQ ID NO: 4561 - DNA, 122 bp, Homo sapiens
  misc_feature (61)..(62): /note="This region represents a CpG dinucleotide"
  misc_feature (61)..(61): /note="Nucleotide may be methylated to form 5-methylcytosine"
ccagtaccacttattgaagggactgtcctttccccattgtgttcctcttaacacccctgtcgaagattagttggccatatatgtttggatttatttctgggctctattctgtttcattgtta

SEQ ID NO: 4562 - DNA, 122 bp, Homo sapiens
  misc_feature (61)..(62): /note="This region represents a CpG dinucleotide"
  misc_feature (61)..(61): /note="Nucleotide may be methylated to form 5-methylcytosine"
tgttgacttaaggactaactggagcaagccctgcttgttaaaagctgaaaatcttgagctcgtaaacaagtttgaagtcaagtgaacttttaagcagagtgctatgggttgaattatgttcc

SEQ ID NO: 4563 - DNA, 122 bp, Homo sapiens
  misc_feature (61)..(62): /note="This region represents a CpG dinucleotide"
  misc_feature (61)..(61): /note="Nucleotide may be methylated to form 5-methylcytosine"
ggaattttgcatagggcactgctaacttgttgggttgatggcaatctctttgacagacagcgtatttttcttgaatagaggccaggcttgttaatgttttcccttagtaaaacagaaggagg

SEQ ID NO: 4564 - DNA, 122 bp, Homo sapiens
  misc_feature (61)..(62): /note="This region represents a CpG dinucleotide"
  misc_feature (61)..(61): /note="Nucleotide may be methylated to form 5-methylcytosine"
tctctaaactatgatccctgtcttgtcaattcacaaagactgctgtgttctccttggcatcgctttgggcactgaggtctggaaggtgcctccaggcagaaatctggagtggttgtggggct

SEQ ID NO: 4565 - DNA, 122 bp, Homo sapiens
  misc_feature (61)..(62): /note="This region represents a CpG dinucleotide"
  misc_feature (61)..(61): /note="Nucleotide may be methylated to form 5-methylcytosine"
actgacattctcaccttctttagggtagggcatctaaggccctggcagatgaagatgctacgaaagaagaggaatcaactcatcattaaggcatcatgagtcaaaggcgtcagctacatgca

SEQ ID NO: 4566 - DNA, 122 bp, Homo sapiens
  misc_feature (61)..(62): /note="This region represents a CpG dinucleotide"
  misc_feature (61)..(61): /note="Nucleotide may be methylated to form 5-methylcytosine"
cagcttgcagcgaccacccgatcccaggctgttcgctgaaggaggaggagaagcagcattcgcagccgcagcagcagcaacttgacccaagtaagtgcaaaagaaattgccccctgatttat

SEQ ID NO: 4567 - DNA, 122 bp, Homo sapiens
  misc_feature (61)..(62): /note="This region represents a CpG dinucleotide"
  misc_feature (61)..(61): /note="Nucleotide may be methylated to form 5-methylcytosine"
gagtgtcagtgctctgggccaccgcacagtgatgctagagtctgtcattccagtgccctgcgggccccctcgctttctgctcggtgtttattcttcagctcctgaacaccaggctgttctca

SEQ ID NO: 4568 - DNA, 122 bp, Homo sapiens
  misc_feature (61)..(62): /note="This region represents a CpG dinucleotide"
  misc_feature (61)..(61): /note="Nucleotide may be methylated to form 5-methylcytosine"
tgtctttcaaaggacttacttaattaggtcaggcccacacaggataatcttcccttgattcgctcggtgaactgagtaagggccttaattatatctgcaaaatgctttcacctctgctgtat

SEQ ID NO: 4569 - DNA, 122 bp, Homo sapiens
  misc_feature (61)..(62): /note="This region represents a CpG dinucleotide"
  misc_feature (61)..(61): /note="Nucleotide may be methylated to form 5-methylcytosine"
ccaaaaagcttactgctgtttagaattcttgctacagtcaggagaaagccgaaagctgcacgggtactgaatcttctacgactgaattagaagaataatgactgtacaattaactatcaacc

SEQ ID NO: 4570 - DNA, 122 bp, Homo sapiens
  misc_feature (61)..(62): /note="This region represents a CpG dinucleotide"
  misc_feature (61)..(61): /note="Nucleotide may be methylated to form 5-methylcytosine"
aattgaagagctttcaacttggcaagtaacagtcccaacctacaacaactaggataaatccggaagattgaaacaaagaggatgcattcacacttatcgggaaaatatttttatgggaacac

SEQ ID NO: 4571 - DNA, 122 bp, Homo sapiens
  misc_feature (61)..(62): /note="This region represents a CpG dinucleotide"
  misc_feature (61)..(61): /note="Nucleotide may be methylated to form 5-methylcytosine"
acttaatgttctgcgggggtagaaggtatcttacgatctatgtaagtcatcataaaagtacgtgcctctgactcatgcttgaggcatcacattccctaagatggtggagttagctctcagtc

SEQ ID NO: 4572 - DNA, 122 bp, Homo sapiens
  misc_feature (61)..(62): /note="This region represents a CpG dinucleotide"
  misc_feature (61)..(61): /note="Nucleotide may be methylated to form 5-methylcytosine"
aaccttgttctgcagaaaatcatcattagcgcccctgagtcttaacaatcgaggcgctgccgataccacggatacctttattgctccctggcattcacatcctaagcccatgctcccaccgt

SEQ ID NO: 4573 - DNA, 122 bp, Homo sapiens
  misc_feature (61)..(62): /note="This region represents a CpG dinucleotide"
  misc_feature (61)..(61): /note="Nucleotide may be methylated to form 5-methylcytosine"
gtggagggcaggcatatttctttcatctattcattcagtcagtcgcttattctttcaacacgtatttattgctgactgtgtgcattgcgcagtgctgagtgagcctggaaatacagcatgca

SEQ ID NO: 4574 - DNA, 122 bp, Homo sapiens
  misc_feature (61)..(62): /note="This region represents a CpG dinucleotide"
  misc_feature (61)..(61): /note="Nucleotide may be methylated to form 5-methylcytosine"
tttgttttgtttttgtttttgagacagtctcgctctgtctcccgggcaggggcttgatctcggctcacttcagcctccacctcctgggttcaagcgattctgcagcagccttccaagtagct

SEQ ID NO: 4575 - DNA, 122 bp, Homo sapiens
  misc_feature (61)..(62): /note="This region represents a CpG dinucleotide"
  misc_feature (61)..(61): /note="Nucleotide may be methylated to form 5-methylcytosine"
ggagtgtagcaggatcttcaactcctgttactatgccaatgatgtctgactgcaccatgacgcaatgagagttatctcgtttaataaaagacaatttctcattcagtacctcagaagagaga

SEQ ID NO: 4576 - DNA, 122 bp, Homo sapiens
  misc_feature (61)..(62): /note="This region represents a CpG dinucleotide"
  misc_feature (61)..(61): /note="Nucleotide may be methylated to form 5-methylcytosine"
accatgggacaaacttcaagaactcactaagtagttcagacacctgagcttgaactctgtcgcttgttatccatgtaaccttgaacacattgcttgaattctcaagaatcaagacaaggaag

SEQ ID NO: 4577 - DNA, 122 bp, Homo sapiens
  misc_feature (61)..(62): /note="This region represents a CpG dinucleotide"
  misc_feature (61)..(61): /note="Nucleotide may be methylated to form 5-methylcytosine"
aaaaagacactcgtattgcttctttccaggttccaccctatggtggattcttctacatcacgcttggaattcattaactccataatcctgtttctgaggaaccataactttgatggactgga

SEQ ID NO: 4578 - DNA, 122 bp, Homo sapiens
  misc_feature (61)..(62): /note="This region represents a CpG dinucleotide"
  misc_feature (61)..(61): /note="Nucleotide may be methylated to form 5-methylcytosine"
ttctcctcaactattttttagaataagggccatttcttttatatcctgtgctcctcactgcgcctatcatggtgtctgtgcacagcgggcactccaagatggtttaaatttatgaattattt

SEQ ID NO: 4579 - DNA, 122 bp, Homo sapiens
  misc_feature (61)..(62): /note="This region represents a CpG dinucleotide"
  misc_feature (61)..(61): /note="Nucleotide may be methylated to form 5-methylcytosine"
ctgcctcccacagaccctggctgctccttctgtccccaacacccatgtgaccctgtggggcgtgtggtgctctctgcccccaggccatgagtatatgtgactattcactgttgatgtcatct

SEQ ID NO: 4580 - DNA, 122 bp, Homo sapiens
  misc_feature (61)..(62): /note="This region represents a CpG dinucleotide"
  misc_feature (61)..(61): /note="Nucleotide may be methylated to form 5-methylcytosine"
tagaataaggatggaagctcctcttggcccccggcacttacatccaaggaggcaaactgacgcctgctgtcagatcaggggaagtcaggaggttaatagtcttgatcccaaacctcctggga

SEQ ID NO: 4581 - DNA, 122 bp, Homo sapiens
  misc_feature (61)..(62): /note="This region represents a CpG dinucleotide"
  misc_feature (61)..(61): /note="Nucleotide may be methylated to form 5-methylcytosine"
tgtggctctgctccttccacaagcacttggggccaggcccatccacctgccatcaggctccgcttcctgaggttacaaatcagagccacccaggctctgaaatgaaatgtgcatttagggcc

SEQ ID NO: 4582 - DNA, 122 bp, Homo sapiens
  misc_feature (61)..(62): /note="This region represents a CpG dinucleotide"
  misc_feature (61)..(61): /note="Nucleotide may be methylated to form 5-methylcytosine"
ggtcgctgccctggccgctccgaggagtcttcgcgccccgctgccccacgctgagggcatcgaaatccagcgtcttgctctcgaaggcgccctccacgttgcagaacatgccgccgtatttc

SEQ ID NO: 4583 - DNA, 122 bp, Homo sapiens
  misc_feature (61)..(62): /note="This region represents a CpG dinucleotide"
  misc_feature (61)..(61): /note="Nucleotide may be methylated to form 5-methylcytosine"
ataattaacagaaagccctttcacaggggaatttaatggaaagtttttcttaagcaaatacgcagaagctcaatagaaatgggtagaaacctgagaataaactggtaacacatgtttaaaca

SEQ ID NO: 4584 - DNA, 122 bp, Homo sapiens
  misc_feature (61)..(62): /note="This region represents a CpG dinucleotide"
  misc_feature (61)..(61): /note="Nucleotide may be methylated to form 5-methylcytosine"
cgcggaagaggcaaactggatgtttcattcattagctcaccaggctcttgtgcgtgcctgcgctgggaggacctgggccctgcgggatctgtcagcagagcgagacaggcttaggcgggcac

SEQ ID NO: 4585 - DNA, 122 bp, Homo sapiens
  misc_feature (61)..(62): /note="This region represents a CpG dinucleotide"
  misc_feature (61)..(61): /note="Nucleotide may be methylated to form 5-methylcytosine"
caccatgaagcaaagtgataacacaaggagaatgcagctctgtcctggaaggagggttgacgactgacagatgatacatgttgagtcaatggaatgaggcagttgcaggctattgttggaac

SEQ ID NO: 4586 - DNA, 122 bp, Homo sapiens
  misc_feature (61)..(62): /note="This region represents a CpG dinucleotide"
  misc_feature (61)..(61): /note="Nucleotide may be methylated to form 5-methylcytosine"
caatgaaggccagtgcagtggctcccctgtaatcccagcactttgggaggccaaggtgggcgaattgcttgaaccgaggagtttgagaccagcctgatcaacatagtgggaaccccatctct

SEQ ID NO: 4587 - DNA, 122 bp, Homo sapiens
  misc_feature (61)..(62): /note="This region represents a CpG dinucleotide"
  misc_feature (61)..(61): /note="Nucleotide may be methylated to form 5-methylcytosine"
tacagccaattaggagagttgctggtggctttctctgcctgcctgtgaagcagcagtgcccgctggggaggtggcaggatttaatagaaggggcatgttcaaacccattcttccagggagtg

SEQ ID NO: 4588 - DNA, 122 bp, Homo sapiens
  misc_feature (61)..(62): /note="This region represents a CpG dinucleotide"
  misc_feature (61)..(61): /note="Nucleotide may be methylated to form 5-methylcytosine"
ggttgcagtaagctgagatctcaccactgcattccagactgggtgacaagagcgaaacttcgactctagctgggcatagtgccacatgcctgtagtcccagctacttaggaggctgaagtgg

SEQ ID NO: 4589 - DNA, 122 bp, Homo sapiens
  misc_feature (61)..(62): /note="This region represents a CpG dinucleotide"
  misc_feature (61)..(61): /note="Nucleotide may be methylated to form 5-methylcytosine"
gtctggcaaaacggagctaccagaagacttggaatcaggcgaggatgcttctgatatgcacgttatccacaccccacgggacagagctctcttgccaatggttggcggaacacaggaaaggc

SEQ ID NO: 4590 - DNA, 122 bp, Homo sapiens
  misc_feature (61)..(62): /note="This region represents a CpG dinucleotide"
  misc_feature (61)..(61): /note="Nucleotide may be methylated to form 5-methylcytosine"
caagatcctggtggtttccactgggccagcgcaggcaagggtggtgcgggaagaaggccacgttaggtacataggccatgtccaaattcaggttccatccagcaagctcctatttcttggac

SEQ ID NO: 4591 - DNA, 122 bp, Homo sapiens
  misc_feature (61)..(62): /note="This region represents a CpG dinucleotide"
  misc_feature (61)..(61): /note="Nucleotide may be methylated to form 5-methylcytosine"
tcttttaggtctcaggatgctcagcttaatttagagtatgtgttaagtacattgtttcagcgtccagagaattttgtgagtgtggatccagtgaggaggtgaacagtaactagaaatgcttg

SEQ ID NO: 4592 - DNA, 122 bp, Homo sapiens
  misc_feature (61)..(62): /note="This region represents a CpG dinucleotide"
  misc_feature (61)..(61): /note="Nucleotide may be methylated to form 5-methylcytosine"
ggaagttgatcctcttatcctgtggatgctatggagaaaactcagctgttagtgccgttacgtgaaaataccactgatcaagactgcttatacttggcagctgggcaaagggaataggatgt

SEQ ID NO: 4593 - DNA, 122 bp, Homo sapiens
  misc_feature (61)..(62): /note="This region represents a CpG dinucleotide"
  misc_feature (61)..(61): /note="Nucleotide may be methylated to form 5-methylcytosine"
gctggagaattttgcctcaggatgaaccatacctcaaatctcacccatacctggtttagacgatacttacatgagatttgggacttaacagttgatgctgatctgggttaagacttttggca

SEQ ID NO: 4594 - DNA, 122 bp, Homo sapiens
  misc_feature (61)..(62): /note="This region represents a CpG dinucleotide"
  misc_feature (61)..(61): /note="Nucleotide may be methylated to form 5-methylcytosine"
caccttcccctctgcttggccggcgccattcttccaaaccactctccgccaaagattccacggacagtcacctacaagacaacccagccgtcctttcagcagcggatcccgccccgcagcca

SEQ ID NO: 4595 - DNA, 122 bp, Homo sapiens
  misc_feature (61)..(62): /note="This region represents a CpG dinucleotide"
  misc_feature (61)..(61): /note="Nucleotide may be methylated to form 5-methylcytosine"
attttgacgatgtgaaagttgttttttaactttcctataaaatacatgtgcatgatatgacgctgcttttagaagaattcaatgaatatttcgtggctgttgtgaatagaaagttgctcttg

SEQ ID NO: 4596 - DNA, 122 bp, Homo sapiens
  misc_feature (61)..(62): /note="This region represents a CpG dinucleotide"
  misc_feature (61)..(61): /note="Nucleotide may be methylated to form 5-methylcytosine"
aaacagggcccaactacaaaacaagttgcctctcgctactacttatatgaacatacttaacgtttgaaaagggattgtcatttacagtgaacatctgctgggtcgtaatccctttctctcag

SEQ ID NO: 4597 - DNA, 122 bp, Homo sapiens
  misc_feature (61)..(62): /note="This region represents a CpG dinucleotide"
  misc_feature (61)..(61): /note="Nucleotide may be methylated to form 5-methylcytosine"
caaactgcatgaatttgtaacattagtttcatgaatttgtgtcatttaaaaataggtcagcgcttaggagtcctactagtgaaggtagttttgagtctttccaagggatctttaagtcagcc

SEQ ID NO: 4598 - DNA, 122 bp, Homo sapiens
  misc_feature (61)..(62): /note="This region represents a CpG dinucleotide"
  misc_feature (61)..(61): /note="Nucleotide may be methylated to form 5-methylcytosine"
tcgtttgctggaaacggctccctttagatcaggaaggttgattttgtgcctttcaccactcgtaattcagtgacttgaaactggccatggcgggagtatttacacaaaggaagtcagtaaat

SEQ ID NO: 4599 - DNA, 122 bp, Homo sapiens
  misc_feature (61)..(62): /note="This region represents a CpG dinucleotide"
  misc_feature (61)..(61): /note="Nucleotide may be methylated to form 5-methylcytosine"
gatacagtttggtttgcttggatttcactttgggattggaggccaatggcccaactgctacggcatacatttgtgaaatctcatacttggccagttagccatgttagatagggaggttacag

SEQ ID NO: 4600 - DNA, 122 bp, Homo sapiens
  misc_feature (61)..(62): /note="This region represents a CpG dinucleotide"
  misc_feature (61)..(61): /note="Nucleotide may be methylated to form 5-methylcytosine"
cttacacaaactagctgtctctgtgtctaggctgtcatggtatagcctattgctcctaggcgacaaacctgtacagcctgttactgtactgaatactgtaggcaattgtagcacatagtgtt

SEQ ID NO: 4601 - DNA, 122 bp, Homo sapiens
  misc_feature (61)..(62): /note="This region represents a CpG dinucleotide"
  misc_feature (61)..(61): /note="Nucleotide may be methylated to form 5-methylcytosine"
gcatcataccaggctcacctgtagttctgcctgaaccatgcaatttagggtttaattatacgctgtcttgcattgtttctactaattgttgcataggtcaatcttatactttcattcatcat

SEQ ID NO: 4602 - DNA, 122 bp, Homo sapiens
  misc_feature (61)..(62): /note="This region represents a CpG dinucleotide"
  misc_feature (61)..(61): /note="Nucleotide may be methylated to form 5-methylcytosine"
agtgattgttaatactaaaagcttaaactttaactgcattttaagcatctgggactggagcgaaagcgggagctgtgagtaaatgctttcagcaggtatgtagttagttattaaaatgggct

SEQ ID NO: 4603 - DNA, 122 bp, Homo sapiens
  misc_feature (61)..(62): /note="This region represents a CpG dinucleotide"
  misc_feature (61)..(61): /note="Nucleotide may be methylated to form 5-methylcytosine"
ataattcatattgctctgacaggggctcttttccaaatgatgtcttatccttcttagtaccgcaaactagattttgttcagacacgttataacaagttagtacaagtttattttgataccaa

SEQ ID NO: 4604 - DNA, 122 bp, Homo sapiens
  misc_feature (61)..(62): /note="This region represents a CpG dinucleotide"
  misc_feature (61)..(61): /note="Nucleotide may be methylated to form 5-methylcytosine"
gtactgagttaaaaagggaaacagctcccgatggagtgttctaggtgccaagaaacaagccgctctgggtgataattgtgccggaagaatggcttaggtgagggaccctgtcaagaacacct

SEQ ID NO: 4605 - DNA, 122 bp, Homo sapiens
  misc_feature (61)..(62): /note="This region represents a CpG dinucleotide"
  misc_feature (61)..(61): /note="Nucleotide may be methylated to form 5-methylcytosine"
acaaaagcagtcatgtttgagtttaatatctctcaaatttagcattttagctaagatgcccgtttttatttcttgcaggtctgctaaaaggtcagagtaatgcagaatgcgtgccttcatct

SEQ ID NO: 4606 - DNA, 122 bp, Homo sapiens
  misc_feature (61)..(62): /note="This region represents a CpG dinucleotide"
  misc_feature (61)..(61): /note="Nucleotide may be methylated to form 5-methylcytosine"
ttgtaataggccaggcgcatggctcacacctgtaatcccagtactttggggaagcttaggcgggaggatagtttgaggccagcctggacaacataagcgagaccctgtctctactaaaaata

SEQ ID NO: 4607 - DNA, 122 bp, Homo sapiens
  misc_feature (61)..(62): /note="This region represents a CpG dinucleotide"
  misc_feature (61)..(61): /note="Nucleotide may be methylated to form 5-methylcytosine"
ctagtaggaaatgtaaaattgtgtagtcactgtgacaaccagtttcatggttcctcaaaacgctaaatataaacctaccatgtgatccagcaattccactcctaggtatatacccaaaggaa

SEQ ID NO: 4608 - DNA, 122 bp, Homo sapiens
  misc_feature (61)..(62): /note="This region represents a CpG dinucleotide"
  misc_feature (61)..(61): /note="Nucleotide may be methylated to form 5-methylcytosine"
aacagaatggaataaagtttgggttatagaaataaaataaaaccaatacaaatatcaaaacgtttagttaatgaagctagttatgtccttggtgagggcactattttacttaaaaatctaag

SEQ ID NO: 4609 - DNA, 122 bp, Homo sapiens
  misc_feature (61)..(62): /note="This region represents a CpG dinucleotide"
  misc_feature (61)..(61): /note="Nucleotide may be methylated to form 5-methylcytosine"
atctgacgaataccttgtccttaatctatgtgaatcatactgactacacatatagtttaccgcactttgttcttagacaaaggtgcatgccagaaaaatggcttgcaatccttttgcaaagc

SEQ ID NO: 4610 - DNA, 122 bp, Homo sapiens
  misc_feature (61)..(62): /note="This region represents a CpG dinucleotide"
  misc_feature (61)..(61): /note="Nucleotide may be methylated to form 5-methylcytosine"
aaacttaaaggagaaaaggattacgaagcttaatgattgctgtttaatgccaagcctaagcggcacgttgcactgtgctgtgctcagaatataacattcaagtaattgagaaaagtggtatc

SEQ ID NO: 4611 - DNA, 122 bp, Homo sapiens
  misc_feature (61)..(62): /note="This region represents a CpG dinucleotide"
  misc_feature (61)..(61): /note="Nucleotide may be methylated to form 5-methylcytosine"
actagaacaattcctggttgtaacagggccacaaagcagcaaggtacctgaaatgttctgcgtcttccttttgagggaaagccatggggggccgggggcaggaaagggaggctgaagggaat

SEQ ID NO: 4612 - DNA, 122 bp, Homo sapiens
  misc_feature (61)..(62): /note="This region represents a CpG dinucleotide"
  misc_feature (61)..(61): /note="Nucleotide may be methylated to form 5-methylcytosine"
gcatgaagaaagattctcatgttgctaagatttcttgcaccgctcttaagcttctgattacgcagaagctggattaactatctcacagtagcagggcagacagtagcatggcagacagcatg

SEQ ID NO: 4613 - DNA, 122 bp, Homo sapiens
  misc_feature (61)..(62): /note="This region represents a CpG dinucleotide"
  misc_feature (61)..(61): /note="Nucleotide may be methylated to form 5-methylcytosine"
tcaaagaccctcagtggatgtcagaaacgaaggacagtactggatcctacacacactatacgcaacagtaggtcagatcaccgaggcagctattaagtgactaaggggtgggtagtgcatac

SEQ ID NO: 4614 - DNA, 122 bp, Homo sapiens
  misc_feature (61)..(62): /note="This region represents a CpG dinucleotide"
  misc_feature (61)..(61): /note="Nucleotide may be methylated to form 5-methylcytosine"
tgggggggctggggccgccccttccgcagggaccccgacccctgttggcatccgcctgtccgtttgaggccgaagcccctctacgtacccccattgcccgcccaaacaccgctcggccgcgt

SEQ ID NO: 4615 - DNA, 122 bp, Homo sapiens
  misc_feature (61)..(62): /note="This region represents a CpG dinucleotide"
  misc_feature (61)..(61): /note="Nucleotide may be methylated to form 5-methylcytosine"
cagtgttccatgcagcaaattgctctgccagtttttactcagtctttaattgcaggccctcgctttaggatctagactgctcctgagtaacatgaatggcagaacctgtgctatgctaaaaa

SEQ ID NO: 4616 - DNA, 122 bp, Homo sapiens
  misc_feature (61)..(62): /note="This region represents a CpG dinucleotide"
  misc_feature (61)..(61): /note="Nucleotide may be methylated to form 5-methylcytosine"
cacctcttattgggagaatgaccttgtgtaaatgacatcacttctgtgtctcagttaacacgcctgtaaaatggaaataatatctatttgtgatggttagttttatgtgccaacttgactga

SEQ ID NO: 4617 - DNA, 122 bp, Homo sapiens
  misc_feature (61)..(62): /note="This region represents a CpG dinucleotide"
  misc_feature (61)..(61): /note="Nucleotide may be methylated to form 5-methylcytosine"
cataggtggggcacggtggctcatgcctgtaatcccaacaatttgggaggccaaggtgggcggatcagttgatcccagaagttcaagactagctagggcaacatggcgaaatcttgtctgta

SEQ ID NO: 4618 - DNA, 122 bp, Homo sapiens
  misc_feature (61)..(62): /note="This region represents a CpG dinucleotide"
  misc_feature (61)..(61): /note="Nucleotide may be methylated to form 5-methylcytosine"
taaggcaatgggagggccagagagggtgcctctcactcccatagtctctgagcgtgataacggtagcgccagaccagcacacaggcttcatgattttcagcagcatgttcttcccatccatg

SEQ ID NO: 4619 - DNA, 122 bp, Homo sapiens
  misc_feature (61)..(62): /note="This region represents a CpG dinucleotide"
  misc_feature (61)..(61): /note="Nucleotide may be methylated to form 5-methylcytosine"
gggggagacagttactaaacatgacaatgaatgcatcattataaattgtgataagtgttacgaagaaaagaacaggctgctacgagaagacttagcatataagagactgtcagaattttttg

SEQ ID NO: 4620 - DNA, 122 bp, Homo sapiens
  misc_feature (61)..(62): /note="This region represents a CpG dinucleotide"
  misc_feature (61)..(61): /note="Nucleotide may be methylated to form 5-methylcytosine"
cataactggtctattctgttctctttttaaaacagagccaagattttcttcttcactcctcgcttggtggctcccagccagaggccggcagtggtgggaggctcgctctgggtgcacagacg

SEQ ID NO: 4621 - DNA, 122 bp, Homo sapiens
  misc_feature (61)..(62): /note="This region represents a CpG dinucleotide"
  misc_feature (61)..(61): /note="Nucleotide may be methylated to form 5-methylcytosine"
aaccaaatgtagttcacaatacagtgtaattcaaaatagttcaccagatagttcagtacacgccattttttttaatcaaataagtatgattttccctaaattcttgcatttcgaactaataa

SEQ ID NO: 4622 - DNA, 122 bp, Homo sapiens
  misc_feature (61)..(62): /note="This region represents a CpG dinucleotide"
  misc_feature (61)..(61): /note="Nucleotide may be methylated to form 5-methylcytosine"
gttaaaaagcagaaggcatgtcagggccaggccgggcctcgggacagagagggctttcttcgcagccctggatgaatctcagtgtcttaatgaaagctcttattagccccagctggcgtccc

SEQ ID NO: 4623 - DNA, 122 bp, Homo sapiens
  misc_feature (61)..(62): /note="This region represents a CpG dinucleotide"
  misc_feature (61)..(61): /note="Nucleotide may be methylated to form 5-methylcytosine"
gataaagtagctgaaacatgtacccgcaggtaacccaatgagtcgaatcagacttgttagcgctgtgttggctaaatgttgaaagaggtttactaaaaatgacaattcacgttttggaacaa

SEQ ID NO: 4624 - DNA, 122 bp, Homo sapiens
  misc_feature (61)..(62): /note="This region represents a CpG dinucleotide"
  misc_feature (61)..(61): /note="Nucleotide may be methylated to form 5-methylcytosine"
gaacacctgtcatgtgtatcaccttggtgttaagagcattataggccgggcgcggtgcctcgtgcctgtaatcccagcactttgggaggctgaggtgggcggatcacttgaggtcaggagtt

SEQ ID NO: 4625 - DNA, 122 bp, Homo sapiens
  misc_feature (61)..(62): /note="This region represents a CpG dinucleotide"
  misc_feature (61)..(61): /note="Nucleotide may be methylated to form 5-methylcytosine"
tgtgtgatctgggagcctcacgtcacctctgctggtaccagggcctgtgtgtctctcctgcgagagagagcaccttactgtatcttcacgtttaaagatgtgtttttgttttccatttcctt

SEQ ID NO: 4626 - DNA, 122 bp, Homo sapiens
  misc_feature (61)..(62): /note="This region represents a CpG dinucleotide"
  misc_feature (61)..(61): /note="Nucleotide may be methylated to form 5-methylcytosine"
gtggaaactcccgataaacccattagatctcgtgagacgtattcactctcgcgagaataacgcgggaaagacccacccccatgattcaactacctccctctgggtccttcccacaatatggg

SEQ ID NO: 4627 - DNA, 122 bp, Homo sapiens
  misc_feature (61)..(62): /note="This region represents a CpG dinucleotide"
  misc_feature (61)..(61): /note="Nucleotide may be methylated to form 5-methylcytosine"
ttttgtttttcctttaacaaggtccaaagaaagatgcaaaaggagatcacacccttgccccgctgagccccgtgataacaagtcactccagactaacctgtgtgccagacatttgtgcattg

SEQ ID NO: 4628 - DNA, 122 bp, Homo sapiens
  misc_feature (61)..(62): /note="This region represents a CpG dinucleotide"
  misc_feature (61)..(61): /note="Nucleotide may be methylated to form 5-methylcytosine"
actctcctgggcttgaccctcagcctcccaagtagctgggactacagacatgtgccaccacgtccagctgattttttaatttttttgaggagacagggtctcactgtgttgttcaggctggc

SEQ ID NO: 4629 - DNA, 122 bp, Homo sapiens
  misc_feature (61)..(62): /note="This region represents a CpG dinucleotide"
  misc_feature (61)..(61): /note="Nucleotide may be methylated to form 5-methylcytosine"
ttcaaaaattcttcccaggcaattctgacgaagacagctcagttcaggtctgtgaactggcgtctgtaaactgctgctctagtgcttttacattttctagccctgtcttgtctgtaactttg

SEQ ID NO: 4630 - DNA, 122 bp, Homo sapiens
  misc_feature (61)..(62): /note="This region represents a CpG dinucleotide"
  misc_feature (61)..(61): /note="Nucleotide may be methylated to form 5-methylcytosine"
aaatccgggcagggtgggtggcccaggcttcacacccagcccagctcagtgaagccatgtcgttgtctgggataaatacctggggttcgttgtctcaccaaggaaatccggtaggcagacac

SEQ ID NO: 4631 - DNA, 122 bp, Homo sapiens
  misc_feature (61)..(62): /note="This region represents a CpG dinucleotide"
  misc_feature (61)..(61): /note="Nucleotide may be methylated to form 5-methylcytosine"
tgtgctcttggcctcataatccttggccatgttgtccagttgaaagtatttatggctgggcgctgtggctcacacctgtaatcctggcactttgggagactgaggcgggtggatcatgaggt

SEQ ID NO: 4632 - DNA, 122 bp, Homo sapiens
  misc_feature (61)..(62): /note="This region represents a CpG dinucleotide"
  misc_feature (61)..(61): /note="Nucleotide may be methylated to form 5-methylcytosine"
gtggtttctctcgtcctctaagaacactcctgttggacgagtgggaagaatgactaacatcggtcacaatctttgagcacttaatgctgtgcatgtcacactctgacctgctgacaaatgtg

SEQ ID NO: 4633 - DNA, 122 bp, Homo sapiens
  misc_feature (61)..(62): /note="This region represents a CpG dinucleotide"
  misc_feature (61)..(61): /note="Nucleotide may be methylated to form 5-methylcytosine"
tgcttccccatccctttgttttgttttgaagcaaatcctagacatctttatcattgcatccgggaacactgagctgcatttacagaagaaagtggaaatgcatgtgtcttccacagccgtac

SEQ ID NO: 4634 - DNA, 122 bp, Homo sapiens
  misc_feature (61)..(62): /note="This region represents a CpG dinucleotide"
  misc_feature (61)..(61): /note="Nucleotide may be methylated to form 5-methylcytosine"
ctcatttttttcttttgtgttatttcccctcttaatgcgtttgcatataacactaccttacgtaaatcacatgctactagcctccttcccacccacctatatactacgtatacataaagcca

SEQ ID NO: 4635 - DNA, 122 bp, Homo sapiens
  misc_feature (61)..(62): /note="This region represents a CpG dinucleotide"
  misc_feature (61)..(61): /note="Nucleotide may be methylated to form 5-methylcytosine"
ttgtttttaatcgtcatggtttgcagatttaattagacacaggcgtgcaagcatcatctccggatctgatgacaaaggcacccacctagggatgcccacccaggcctgcttcttcctttagg

SEQ ID NO: 4636 - DNA, 122 bp, Homo sapiens
  misc_feature (61)..(62): /note="This region represents a CpG dinucleotide"
  misc_feature (61)..(61): /note="Nucleotide may be methylated to form 5-methylcytosine"
tgcattgcatgagggtgagtcaactgttgcaccgtcaacccagacatttacgagaggtggcgccatgggtttcttcttcacacaagttctagttgggtgtgtgtgggtggtcttccacatgg

SEQ ID NO: 4637 - DNA, 122 bp, Homo sapiens
  misc_feature (61)..(62): /note="This region represents a CpG dinucleotide"
  misc_feature (61)..(61): /note="Nucleotide may be methylated to form 5-methylcytosine"
ttgttttaaaagtaaatcccgccagaacacagtgcccttttaaatataagcagaattaatcgccttaaaaagcaagaaccaaaccgaaacaaaaatactcagaacaaacacgaagacttcag

SEQ ID NO: 4638 - DNA, 122 bp, Homo sapiens
  misc_feature (61)..(62): /note="This region represents a CpG dinucleotide"
  misc_feature (61)..(61): /note="Nucleotide may be methylated to form 5-methylcytosine"
ctaatttaacataagaagtagacatggacagattaactatgggcacatgacaacacatcacggtaccaggtttctaagaaaaatgtttgcccaggggactagcttaaaacagagagtagtaa

SEQ ID NO: 4639 - DNA, 122 bp, Homo sapiens
  misc_feature (61)..(62): /note="This region represents a CpG dinucleotide"
  misc_feature (61)..(61): /note="Nucleotide may be methylated to form 5-methylcytosine"
gcatgggctactaagcctggataattttttttcttttttgtaggaacaggggtcttgctacgttgccaaggctggtatgaatctcctgaactcaagcaatcctcctgcctctgcctcccaaa

SEQ ID NO: 4640 - DNA, 122 bp, Homo sapiens
  misc_feature (61)..(62): /note="This region represents a CpG dinucleotide"
  misc_feature (61)..(61): /note="Nucleotide may be methylated to form 5-methylcytosine"
attatgtgcaaagagaatggcagaggggagtattaaggagctaaacctcggagagtgattcggatcacgagtaagtgttgtgctgaagcatggaaagtctgtgctctggaaaagacactggc

SEQ ID NO: 4641 - DNA, 122 bp, Homo sapiens
  misc_feature (61)..(62): /note="This region represents a CpG dinucleotide"
  misc_feature (61)..(61): /note="Nucleotide may be methylated to form 5-methylcytosine"
taggctgtatggtgtagcctattgcccctaggctacaaacctgtacagcaggttactgtacggaatacttcaggcagttataaaatagtggtgtgtgtttgtgtatcaaaacagaaaaagta

SEQ ID NO: 4642 - DNA, 122 bp, Homo sapiens
  misc_feature (61)..(62): /note="This region represents a CpG dinucleotide"
  misc_feature (61)..(61): /note="Nucleotide may be methylated to form 5-methylcytosine"
aatccaggaattcacctctggagattgacctgaaagcaaggactcggatacatatttgcacgccagtgtttgtagcagcatgatttgcaagaaccaaaaggagcaagtaacgtaagtgttca

SEQ ID NO: 4643 - DNA, 122 bp, Homo sapiens
  misc_feature (61)..(62): /note="This region represents a CpG dinucleotide"
  misc_feature (61)..(61): /note="Nucleotide may be methylated to form 5-methylcytosine"
ccccaccctgcccccaacccagcctggggattttggtctccagggatcaaaatcatttgtcgtgagtgcaggtatgtaaataagtttattttcagggaaaatactcaagacaaatttattaa

SEQ ID NO: 4644 - DNA, 122 bp, Homo sapiens
  misc_feature (61)..(62): /note="This region represents a CpG dinucleotide"
  misc_feature (61)..(61): /note="Nucleotide may be methylated to form 5-methylcytosine"
ctctcctctttgaaagcacccttgaccctgaacgattttgcatgtctgtaatttgaatgtcgtgtggttacaggacccggtcagcccaaggagcaggggtccagcagctctgcggaggcatc

SEQ ID NO: 4645 - DNA, 122 bp, Homo sapiens
  misc_feature (61)..(62): /note="This region represents a CpG dinucleotide"
  misc_feature (61)..(61): /note="Nucleotide may be methylated to form 5-methylcytosine"
caggatattttacatgaaatcctgaggcttagaaaattagctcatcttgcattcttggaccgtgagagctgcaaggagcttccaagaaaatgtgccgagtgttggggctcctccctccaagt

SEQ ID NO: 4646 - DNA, 122 bp, Homo sapiens
  misc_feature (61)..(62): /note="This region represents a CpG dinucleotide"
  misc_feature (61)..(61): /note="Nucleotide may be methylated to form 5-methylcytosine"
ttaaacaaagaaactccacttggatcaagctcttgacaaagatccaaccaattaggtaaacggtatagtctcgaaaggcagtgacatttcatgcaaggaatactgaattggaagcatggaga

SEQ ID NO: 4647 - DNA, 122 bp, Homo sapiens
  misc_feature (61)..(62): /note="This region represents a CpG dinucleotide"
  misc_feature (61)..(61): /note="Nucleotide may be methylated to form 5-methylcytosine"
tggtgacagtgtgagttatggctctgctggctgccagtggagccagtcgctctgcgcagccgtgcaagggtgttttgaaaagtggctcagccggccaggagtgactgggtgtaaatattgct

SEQ ID NO: 4648 - DNA, 122 bp, Homo sapiens
  misc_feature (61)..(62): /note="This region represents a CpG dinucleotide"
  misc_feature (61)..(61): /note="Nucleotide may be methylated to form 5-methylcytosine"
tttttttgttgtatggatttagtggggttaggattgagatagcgtgtgtgtttgcacgctcgcatgcagaaagatagagaaaaagagagcgcacataagtagttttgctttgaagtccctac

SEQ ID NO: 4649 - DNA, 122 bp, Homo sapiens
  misc_feature (61)..(62): /note="This region represents a CpG dinucleotide"
  misc_feature (61)..(61): /note="Nucleotide may be methylated to form 5-methylcytosine"
cgtgctgggtatagcactgaaagtcccatatcctgggaagccttttagtcctgggcaaaccgggacagttggtccccttacacatgaagcagtttcactgggctgatggctgggttagcaca

SEQ ID NO: 4650 - DNA, 122 bp, Homo sapiens
  misc_feature (61)..(62): /note="This region represents a CpG dinucleotide"
  misc_feature (61)..(61): /note="Nucleotide may be methylated to form 5-methylcytosine"
aactgttaagctagaccacccctgcctggctgaagtgctgattattagtcagtgggactgcgcacagcagatcatcatgtacttctggcatatccagaggtgacacttctccccagatgctc

SEQ ID NO: 4651 - DNA, 122 bp, Homo sapiens
  misc_feature (61)..(62): /note="This region represents a CpG dinucleotide"
  misc_feature (61)..(61): /note="Nucleotide may be methylated to form 5-methylcytosine"
tattaagtcatgactcatctccttttgctaaaatggtgactagctcttctatttccttttcgttccctgtgtgcaccatgttctttatatgcttttactttggcacattctgtctgtctgtg

SEQ ID NO: 4652 - DNA, 122 bp, Homo sapiens
  misc_feature (61)..(62): /note="This region represents a CpG dinucleotide"
  misc_feature (61)..(61): /note="Nucleotide may be methylated to form 5-methylcytosine"
gaatccaaaagtaaaaacattttcctttgacctaatctatttcttaatgttctctttcagcgtgttacccatataggcatcatttcggtagttatttagtgtacacattctataatgcattt

SEQ ID NO: 4653 - DNA, 122 bp, Homo sapiens
  misc_feature (61)..(62): /note="This region represents a CpG dinucleotide"
  misc_feature (61)..(61): /note="Nucleotide may be methylated to form 5-methylcytosine"
aatagatggagagagatggatcagggcagggcaggggtggagaagtgagctagtgcagtccgggcggatgctttagaaataccctggaagtggtaataaaggcctaagttagtatgactgca

SEQ ID NO: 4654 - DNA, 122 bp, Homo sapiens
  misc_feature (61)..(62): /note="This region represents a CpG dinucleotide"
  misc_feature (61)..(61): /note="Nucleotide may be methylated to form 5-methylcytosine"
caggtaaagtatgaagttggcaagctgtcctgatcagtccctttcttcctcctgaggatacgtttcaacaggggtaaatacccataaaatgagcctactttagaggtagtcatattgagaag

SEQ ID NO: 4655 - DNA, 122 bp, Homo sapiens
  misc_feature (61)..(62): /note="This region represents a CpG dinucleotide"
  misc_feature (61)..(61): /note="Nucleotide may be methylated to form 5-methylcytosine"
tttatattaaacaggaggctggagcaagtcaccgccaaggtccttctaatctcgactctgcggttttatgggactttgtttaataattgtttctagggctggccgatgagcagggtactccc

SEQ ID NO: 4656 - DNA, 122 bp, Homo sapiens
  misc_feature (61)..(62): /note="This region represents a CpG dinucleotide"
  misc_feature (61)..(61): /note="Nucleotide may be methylated to form 5-methylcytosine"
tgcgcctggccagattcctgttttctgtaactagtaacctcaagtattctgttttttatccgagcagcacagcaaaggtcatgagacatgcctgagcaggcataatctaactgtcatagttt

SEQ ID NO: 4657 - DNA, 122 bp, Homo sapiens
  misc_feature (61)..(62): /note="This region represents a CpG dinucleotide"
  misc_feature (61)..(61): /note="Nucleotide may be methylated to form 5-methylcytosine"
ctcagtatgactattgtacagaattcactcatttgcctcctttcactgggcttggtcagccgtactaaaacgcaagttgcctcccatttggaaaggccagtcttgacgggtctcttctctgt

SEQ ID NO: 4658 - DNA, 122 bp, Homo sapiens
  misc_feature (61)..(62): /note="This region represents a CpG dinucleotide"
  misc_feature (61)..(61): /note="Nucleotide may be methylated to form 5-methylcytosine"
aggattgagatagcgtgtgtgtttgcacgctcgcatgcagaaagatagagaaaaagagagcgcacataagtagttttgctttgaagtccctacataattactgttaagatctatcaaaatgt

SEQ ID NO: 4659 - DNA, 122 bp, Homo sapiens
  misc_feature (61)..(62): /note="This region represents a CpG dinucleotide"
  misc_feature (61)..(61): /note="Nucleotide may be methylated to form 5-methylcytosine"
ccctggttttaaaaataaagtttcgagccgagagtggtggcgcccgtggtcccagctcctcgggaggctgaggctgggggatccctggagcccgcgaggcaaaggctgcagtgagccgagat

SEQ ID NO: 4660 - DNA, 122 bp, Homo sapiens
  misc_feature (61)..(62): /note="This region represents a CpG dinucleotide"
  misc_feature (61)..(61): /note="Nucleotide may be methylated to form 5-methylcytosine"
aggaataaagagcaaatttcaacaggtataagcctgaaacttgctcacaaagtgcctctccgtcaacaataattcaccaggtccagacaatgaactgagaaaatctgctagcatcgcctctg

SEQ ID NO: 4661 - DNA, 122 bp, Homo sapiens
  misc_feature (61)..(62): /note="This region represents a CpG dinucleotide"
  misc_feature (61)..(61): /note="Nucleotide may be methylated to form 5-methylcytosine"
attagtgttaactctgggagctcgggagcgtgcaccaccaccagtgtcaccgagcgcacccgcacagcagctaaccagtcaggcagcagaacgagtggcggcagtttgccggggcgtgcaga

SEQ ID NO: 4662 - DNA, 122 bp, Homo sapiens
  misc_feature (61)..(62): /note="This region represents a CpG dinucleotide"
  misc_feature (61)..(61): /note="Nucleotide may be methylated to form 5-methylcytosine"
gatgggtggtcgccccaccctaatcttattatgcaaattgggtctttgcccggcctgcaccgtattgtcttctccttactgtacacatggtttggcaaagagaagagaagacggagctgcga

SEQ ID NO: 4663 - DNA, 122 bp, Homo sapiens
  misc_feature (61)..(62): /note="This region represents a CpG dinucleotide"
  misc_feature (61)..(61): /note="Nucleotide may be methylated to form 5-methylcytosine"
gccctgtaagttctccgagggccacttgcacagcaggaggggcgagggccgtgtacgtggcgctggccgtcgggcgggctagaggggaccctcagagcacccgggagatgggggtagaagcg

SEQ ID NO: 4664 - DNA, 122 bp, Homo sapiens
  misc_feature (61)..(62): /note="This region represents a CpG dinucleotide"
  misc_feature (61)..(61): /note="Nucleotide may be methylated to form 5-methylcytosine"
tttggagctctgtatctcattctttcggtttcttctggttttcaccaaatagcatgtgttcgccatctagccacgttgctggatgtgtgtccagtgtatggcgtctggcagctgaacagttg

SEQ ID NO: 4665 - DNA, 122 bp, Homo sapiens
  misc_feature (61)..(62): /note="This region represents a CpG dinucleotide"
  misc_feature (61)..(61): /note="Nucleotide may be methylated to form 5-methylcytosine"
ctaaagttaatagctcccacagctctgactctttaaggaaattaagaggccagaaggcagcgttctaatcagatttgtgggtaagatggttatcgatagtagttaatgatggatgaagtgca

SEQ ID NO: 4666 - DNA, 122 bp, Homo sapiens
  misc_feature (61)..(62): /note="This region represents a CpG dinucleotide"
  misc_feature (61)..(61): /note="Nucleotide may be methylated to form 5-methylcytosine"
tacaaccaagagcttcttaagctattaacagccaagtgtcacagccttaaagatttgcaccgtttgctcatctcaggcatgcccccagtcacaaattcctgcaaaataaaccttggttggac

SEQ ID NO: 4667 - DNA, 122 bp, Homo sapiens
  misc_feature (61)..(62): /note="This region represents a CpG dinucleotide"
  misc_feature (61)..(61): /note="Nucleotide may be methylated to form 5-methylcytosine"
gtgtccttgttggaatatccttacctttgtcaacagagagtagcagttcatccacaagctcgtgagcagccactggcagcactgcctccatgaggcctcgggagcattctcattgttttctc

SEQ ID NO: 4668 - DNA, 122 bp, Homo sapiens
  misc_feature (61)..(62): /note="This region represents a CpG dinucleotide"
  misc_feature (61)..(61): /note="Nucleotide may be methylated to form 5-methylcytosine"
tgaggactgaatgagttcatgttttacaccaaatgctttcaacatgagaatccgcccagtcgtatctaataaaaatatccttcctgagctggtaccaggaggtttcattaaaatagcagtcg

SEQ ID NO: 4669 - DNA, 122 bp, Homo sapiens
  misc_feature (61)..(62): /note="This region represents a CpG dinucleotide"
  misc_feature (61)..(61): /note="Nucleotide may be methylated to form 5-methylcytosine"
ctatttggcttcaaattgaagtttctttcctacactctcctgcaggctgtcagaagcattcgtgctcccagaattccagcacatcatgtgcagccaatgggccccagaagttaattgtcaag

SEQ ID NO: 4670 - DNA, 122 bp, Homo sapiens
  misc_feature (61)..(62): /note="This region represents a CpG dinucleotide"
  misc_feature (61)..(61): /note="Nucleotide may be methylated to form 5-methylcytosine"
atgtttttctggttttcttttgccctcttcagctctggtggatcagaaattgcagttccccgttgaagttctcccttatattttacctaagaaggataaataagaactttaacagatagcac

SEQ ID NO: 4671 - DNA, 122 bp, Homo sapiens
  misc_feature (61)..(62): /note="This region represents a CpG dinucleotide"
  misc_feature (61)..(61): /note="Nucleotide may be methylated to form 5-methylcytosine"
acccaggctggagtggagtagcgtgatcacgactcatggcagccacaacctcctgagctccgctgatcctcctacctcagcctcctgagtagctgggactacaggtgcataccgccatgccg

SEQ ID NO: 4672 - DNA, 122 bp, Homo sapiens
  misc_feature (61)..(62): /note="This region represents a CpG dinucleotide"
  misc_feature (61)..(61): /note="Nucleotide may be methylated to form 5-methylcytosine"
tgagagttctgttgcttcttgttctcaccaacacttgctgttgtcaaatatttttatttccgttatttgcatgggaatgtggtgacagcctgccttcctgaagactggataggttgagcagc

SEQ ID NO: 4673 - DNA, 122 bp, Homo sapiens
  misc_feature (61)..(62): /note="This region represents a CpG dinucleotide"
  misc_feature (61)..(61): /note="Nucleotide may be methylated to form 5-methylcytosine"
gtgatgctggccacctggagccaattatttaagagcttcaagaacaagcagctcatactgcggtgcattctggggctttggctcactcagctttggttcctcccttttctgatcatggctct

SEQ ID NO: 4674 - DNA, 122 bp, Homo sapiens
  misc_feature (61)..(62): /note="This region represents a CpG dinucleotide"
  misc_feature (61)..(61): /note="Nucleotide may be methylated to form 5-methylcytosine"
atgactgcaactctgttcaccgacattttgctctgctaagtcaaatatttgttggcatttcgtgtacactggtatctcttctcctattctctttgccctgtgtatttgtacattttattgcc

SEQ ID NO: 4675 - DNA, 122 bp, Homo sapiens
  misc_feature (61)..(62): /note="This region represents a CpG dinucleotide"
  misc_feature (61)..(61): /note="Nucleotide may be methylated to form 5-methylcytosine"
tgcccattaaagcctcacacccaaggtcctcagggacggcagggctctgaccagcatccacgtgccacaccctgtcccctagaaggctccaaacccactgactctgtgaacaaaggaagggg

SEQ ID NO: 4676 - DNA, 122 bp, Homo sapiens
  misc_feature (61)..(62): /note="This region represents a CpG dinucleotide"
  misc_feature (61)..(61): /note="Nucleotide may be methylated to form 5-methylcytosine"
cctggagtcctgttgatgtggtggaaaaacatgggggaggtgaagcattctataatcttacgattaaatctcagcattttagtgggcttgtgtccttgggctgtgacctacacaagtgttct

SEQ ID NO: 4677 - DNA, 122 bp, Homo sapiens
  misc_feature (61)..(62): /note="This region represents a CpG dinucleotide"
  misc_feature (61)..(61): /note="Nucleotide may be methylated to form 5-methylcytosine"
gagtcttacatctgtgtagaagttgtgccaagtctaagaaaatttcaccccaggagcagtcgcttagcttccgagtccacacagcagcaacctgccccatggtttttagtttgacaccgtgt

SEQ ID NO: 4678 - DNA, 122 bp, Homo sapiens
  misc_feature (61)..(62): /note="This region represents a CpG dinucleotide"
  misc_feature (61)..(61): /note="Nucleotide may be methylated to form 5-methylcytosine"
ggccatgaagagggagaggtgcagagtgaccaggcagttggtgcgtctttgccgagtacccgctgtgtgccaggcactggggtgcagtggtgaacaggacaggcaggcaggcttcttggtgc

SEQ ID NO: 4679 - DNA, 122 bp, Homo sapiens
  misc_feature (61)..(62): /note="This region represents a CpG dinucleotide"
  misc_feature (61)..(61): /note="Nucleotide may be methylated to form 5-methylcytosine"
aaattatctgtcctacctactattacagttaaccatagagttcagtaactacatagcccacgtacttgaaatccgtagctcattacatgagataggttgttctaagaattcaaacgtttatt

SEQ ID NO: 4680 - DNA, 122 bp, Homo sapiens
  misc_feature (61)..(62): /note="This region represents a CpG dinucleotide"
  misc_feature (61)..(61): /note="Nucleotide may be methylated to form 5-methylcytosine"
cattagtgttactatcaactttattagctcattttctgccaaatgaagccaagtgttttccgtattgctttggtcaaatccagtgtgctcccaagagcacctgacctcacacttacttagca

SEQ ID NO: 4681 - DNA, 122 bp, Homo sapiens
  misc_feature (61)..(62): /note="This region represents a CpG dinucleotide"
  misc_feature (61)..(61): /note="Nucleotide may be methylated to form 5-methylcytosine"
tcatccttagtcactggtttgtcagattaaaggagaactcacttatactttatgtaagtgcgtatgtttaagataaaatcaaactgcatggtgttaatgagttggaattaaaatcccttctt

SEQ ID NO: 4682 - DNA, 122 bp, Homo sapiens
  misc_feature (61)..(62): /note="This region represents a CpG dinucleotide"
  misc_feature (61)..(61): /note="Nucleotide may be methylated to form 5-methylcytosine"
ctccgtaacctactcctctgcttttgacttctgtttctgcgtgacagagcctggtatctgcgttctatttatattatatattgttattctgtgttcccagagaaactggaatgcaaaaacct

SEQ ID NO: 4683 - DNA, 122 bp, Homo sapiens
  misc_feature (61)..(62): /note="This region represents a CpG dinucleotide"
  misc_feature (61)..(61): /note="Nucleotide may be methylated to form 5-methylcytosine"
ttggaggggccgcttcctggcctcatggcccatgtgcaccaggtgagctgtgagctgagccgtgcgcagcagctgcttgcctgtagccaattacctcagccctgctgggtgcagaagagggc

SEQ ID NO: 4684 - DNA, 122 bp, Homo sapiens
  misc_feature (61)..(62): /note="This region represents a CpG dinucleotide"
  misc_feature (61)..(61): /note="Nucleotide may be methylated to form 5-methylcytosine"
ctgctttccctgagagcagcactcccttatccctggaacgccgcgccctgcgtggttccccgccctccccacgcgcgggggcgccctgacagtcccctgctgctcctctgctgggcgccaca

SEQ ID NO: 4685 - DNA, 122 bp, Homo sapiens
  misc_feature (61)..(62): /note="This region represents a CpG dinucleotide"
  misc_feature (61)..(61): /note="Nucleotide may be methylated to form 5-methylcytosine"
ctcgtggtagagcttggaggcctcctgcgagggcagcatggtgcccggaggcggggccggcggcggcggcggctggcgggggccgccggcccgggacggagcgccgggctgccgggcgggag

SEQ ID NO: 4686 - DNA, 122 bp, Homo sapiens
  misc_feature (61)..(62): /note="This region represents a CpG dinucleotide"
  misc_feature (61)..(61): /note="Nucleotide may be methylated to form 5-methylcytosine"
cccagaactacaatggtgtgtccgacgtagagctgagagtagcattaccagatggaacaacggttacagtcagggttaaaaagaacagtactacagaccaagtatatcaggtaaattaaatg

SEQ ID NO: 4687 - DNA, 122 bp, Homo sapiens
  misc_feature (61)..(62): /note="This region represents a CpG dinucleotide"
  misc_feature (61)..(61): /note="Nucleotide may be methylated to form 5-methylcytosine"
gacccctgctccaagatgcaaatccacagctttggatcagtttgtaagtgtgagtaaagccgaaagtaatgcatgatacagatgaggtgttcacatttaattctgctaaaatgacaccatga

SEQ ID NO: 4688 - DNA, 122 bp, Homo sapiens
  misc_feature (61)..(62): /note="This region represents a CpG dinucleotide"
  misc_feature (61)..(61): /note="Nucleotide may be methylated to form 5-methylcytosine"
tcaaagaagccattttatcttggcagggtacaaccaactcagaagtgctgagtgttccctcgtatctgttggaagtagtcctcataacctccctatgtctcaggatgccagtttcttacagt

SEQ ID NO: 4689 - DNA, 122 bp, Homo sapiens
  misc_feature (61)..(62): /note="This region represents a CpG dinucleotide"
  misc_feature (61)..(61): /note="Nucleotide may be methylated to form 5-methylcytosine"
ggagcagcagggccaaatagatgccctcaagcccttttataagggcattaattccattcacgagggcagagccttcatgacaatggcagtccaaagtgccttccaaagtccccacctcttaa

SEQ ID NO: 4690 - DNA, 122 bp, Homo sapiens
  misc_feature (61)..(62): /note="This region represents a CpG dinucleotide"
  misc_feature (61)..(61): /note="Nucleotide may be methylated to form 5-methylcytosine"
gagctttcacttttgtttgcataatccataaaattggccgggacaaacattcgccatgaccgtctatgctctttcttttccgcatgagatttggctttaggtaatcctgtggttcgaatgat

SEQ ID NO: 4691 - DNA, 122 bp, Homo sapiens
  misc_feature (61)..(62): /note="This region represents a CpG dinucleotide"
  misc_feature (61)..(61): /note="Nucleotide may be methylated to form 5-methylcytosine"
atattaagtgctcaataaatgacaactattattatcccttagacctcattgcctcttcaacgcttaaaagctcagcaagtccctttaaaatgaaattctcaaagcagtcatttcccagtcca

SEQ ID NO: 4692 - DNA, 122 bp, Homo sapiens
  misc_feature (61)..(62): /note="This region represents a CpG dinucleotide"
  misc_feature (61)..(61): /note="Nucleotide may be methylated to form 5-methylcytosine"
agttaacaacctggacagacaggcccatcatgtgtgttatgacctatctggtttcctactcgcatggttagaaggctcattttattgctttgaactctggaattaatcctgcttaaaggaga

SEQ ID NO: 4693 - DNA, 122 bp, Homo sapiens
  misc_feature (61)..(62): /note="This region represents a CpG dinucleotide"
  misc_feature (61)..(61): /note="Nucleotide may be methylated to form 5-methylcytosine"
atttatttatttttttgagacaggttttcactctgtcacccaggctgtagtgcagtgccccgatctcggttcatggcaccccctacctctggggctctagtgatttccccacctcagcctcc

SEQ ID NO: 4694 - DNA, 122 bp, Homo sapiens
  misc_feature (61)..(62): /note="This region represents a CpG dinucleotide"
  misc_feature (61)..(61): /note="Nucleotide may be methylated to form 5-methylcytosine"
aggttagcatgtaattacagcactgtattctaaattgaatagaggtgtggacagagactgcgactaactcttacacactggatagaggctgcagctaactcttacacacccaggagtcacca

SEQ ID NO: 4695 - DNA, 122 bp, Homo sapiens
  misc_feature (61)..(62): /note="This region represents a CpG dinucleotide"
  misc_feature (61)..(61): /note="Nucleotide may be methylated to form 5-methylcytosine"
tggaaggacttcctggcaatccaggactgtcttcggggaggagagagacccagtaaaacccgtgctcacctgagccgccagagtcaagactgcaccagcaggcactcacacacgaagagaca

SEQ ID NO: 4696 - DNA, 122 bp, Homo sapiens
  misc_feature (61)..(62): /note="This region represents a CpG dinucleotide"
  misc_feature (61)..(61): /note="Nucleotide may be methylated to form 5-methylcytosine"
acccactgctgccgctcgtgctctccgcccagccacggcgcccgctcccgaggccatcagcgggttgcctgccactgaccgtgccaggatgcacagaccgaccaacagacctcagtgcccac

SEQ ID NO: 4697 - DNA, 122 bp, Homo sapiens
  misc_feature (61)..(62): /note="This region represents a CpG dinucleotide"
  misc_feature (61)..(61): /note="Nucleotide may be methylated to form 5-methylcytosine"
gacagaattgaagactgctaatgaatgttggccacttagcaaccacaaagttagcaacttcgagcaacagccacagacgcgctatcctgtggctctggaccacctactcccactactctaag

SEQ ID NO: 4698 - DNA, 122 bp, Homo sapiens
  misc_feature (61)..(62): /note="This region represents a CpG dinucleotide"
  misc_feature (61)..(61): /note="Nucleotide may be methylated to form 5-methylcytosine"
cttcaggatccatccaatattctccaatatcaattagcactttgcctttaaaatcttgaacgccaacgtacctcattttcccaatctgaaacatgttaccatctctgctgctgctcctctgt

SEQ ID NO: 4699 - DNA, 122 bp, Homo sapiens
  misc_feature (61)..(62): /note="This region represents a CpG dinucleotide"
  misc_feature (61)..(61): /note="Nucleotide may be methylated to form 5-methylcytosine"
tcatgtcacttaaccatttgtaaaatgggaaccatagtggaactccctgtggagctattacgagggttgagggcattcatcagtgtgagacactctataaatgtcagtttgttgtgactaat

SEQ ID NO: 4700 - DNA, 122 bp, Homo sapiens
  misc_feature (61)..(62): /note="This region represents a CpG dinucleotide"
  misc_feature (61)..(61): /note="Nucleotide may be methylated to form 5-methylcytosine"
tttattgttttgcttagtctggttttatttcaggaagttaggagacactgggcccgacagcgcagatgacaagccgtgatgcaaatgcttcctatctatgagacaggaaatgctctcagacc

SEQ ID NO: 4701 - DNA, 122 bp, Homo sapiens
  misc_feature (61)..(62): /note="This region represents a CpG dinucleotide"
  misc_feature (61)..(61): /note="Nucleotide may be methylated to form 5-methylcytosine"
gtgaagaagcatgaagttaactaaaaggaaaggagaaaacacactgaagaaactggtaaacgttcggtggaacatattcactaggataccgcctttgtagaaatgatctttctcctcccctt

SEQ ID NO: 4702 - DNA, 122 bp, Homo sapiens
  misc_feature (61)..(62): /note="This region represents a CpG dinucleotide"
  misc_feature (61)..(61): /note="Nucleotide may be methylated to form 5-methylcytosine"
ggagaaagggtcgcgccgggcagccgcgaaagcaaggcttccccacgtctgttgacaggacggccgcctctctacttccgctggctacggcctctacgcagtagaggtaccgcgtctgtggg

SEQ ID NO: 4703 - DNA, 122 bp, Homo sapiens
  misc_feature (61)..(62): /note="This region represents a CpG dinucleotide"
  misc_feature (61)..(61): /note="Nucleotide may be methylated to form 5-methylcytosine"
ttctttggctttcaggctctgggacttgcaccagcagcttcccagggggttttgggccttcggcctcagctgggggctttaccatcttttttttaccttttgtggttctgatcctcccagac

SEQ ID NO: 4704 - DNA, 122 bp, Homo sapiens
  misc_feature (61)..(62): /note="This region represents a CpG dinucleotide"
  misc_feature (61)..(61): /note="Nucleotide may be methylated to form 5-methylcytosine"
gctgcgtgccccggcgcgcacccctcccactcccatccactcggagccacgtcccctgcccggctccggccggctcccaccgtccccggccaccgtcttcgcccctgcccggcccccgcccc

SEQ ID NO: 4705 - DNA, 122 bp, Homo sapiens
  misc_feature (61)..(62): /note="This region represents a CpG dinucleotide"
  misc_feature (61)..(61): /note="Nucleotide may be methylated to form 5-methylcytosine"
ccatatcaatgtagagaattatgaaacacaggtgggagtcagtagaaagtgaagaaacagcgccacaaatgagtaaagcaggtctagcaggcttgtctgttgagttactgactactggcatg

SEQ ID NO: 4706 - DNA, 122 bp, Homo sapiens
  misc_feature (61)..(62): /note="This region represents a CpG dinucleotide"
  misc_feature (61)..(61): /note="Nucleotide may be methylated to form 5-methylcytosine"
gaagataatgcgtttgagatgccaatgtgaagtgccaatttgagtcacagctagaaattccggttttgagcaatggatggatatatctgaactggagatacaagtctgggagtcatcaatgc

SEQ ID NO: 4707 - DNA, 122 bp, Homo sapiens
  misc_feature (61)..(62): /note="This region represents a CpG dinucleotide"
  misc_feature (61)..(61): /note="Nucleotide may be methylated to form 5-methylcytosine"
tccaggaactgacctttgatcatccacactggtgatgtttcctgaaaggggaacaataaacgttaattaccggattgtgtttgctccaggcttttggcattgtgcctgcactgactaaaagc

SEQ ID NO: 4708 - DNA, 122 bp, Homo sapiens
  misc_feature (61)..(62): /note="This region represents a CpG dinucleotide"
  misc_feature (61)..(61): /note="Nucleotide may be methylated to form 5-methylcytosine"
ctcgtgcccgccgcctcggctgcagggccctccacctgcagcgctttcgtccctacctggcgttcaccgttctcacccatcacatcagcacaacgtgaccttgtggggagccacctcctctg

SEQ ID NO: 4709 - DNA, 122 bp, Homo sapiens
  misc_feature (61)..(62): /note="This region represents a CpG dinucleotide"
  misc_feature (61)..(61): /note="Nucleotide may be methylated to form 5-methylcytosine"
ggctcaactgcctctgtccctaatgcaaatttaccagctgaaatccttcagagatacattcgctgataaacaggctacaataggtgtagaaagatgtgggtaatgactgactagattgcaac

SEQ ID NO: 4710 - DNA, 122 bp, Homo sapiens
  misc_feature (61)..(62): /note="This region represents a CpG dinucleotide"
  misc_feature (61)..(61): /note="Nucleotide may be methylated to form 5-methylcytosine"
gagaaatgcatcactaggcaatttcattgttgtgcgaacatcaccacacctggatggtggcgcctactacacacctaggctacagggtacagtctattcctccttggctacaaacctgtaca

SEQ ID NO: 4711 - DNA, 122 bp, Homo sapiens
  misc_feature (61)..(62): /note="This region represents a CpG dinucleotide"
  misc_feature (61)..(61): /note="Nucleotide may be methylated to form 5-methylcytosine"
gcaatccaattcttactattggtatttgacacgcaaaatactcacacgcaatttcatgttcgcttggtgtcttcactcacaggacaaagccagatggcacagcaaatctttataatcaaaag

SEQ ID NO: 4712 - DNA, 122 bp, Homo sapiens
  misc_feature (61)..(62): /note="This region represents a CpG dinucleotide"
  misc_feature (61)..(61): /note="Nucleotide may be methylated to form 5-methylcytosine"
agtttctggtgaggaaaatctccatccccaactggaaaatatcccagtgtttggattgctcgttctttcatctggaagaacaccaaatttttttcttttaaacagagtatataatagcttta

SEQ ID NO: 4713 - DNA, 122 bp, Homo sapiens
  misc_feature (61)..(62): /note="This region represents a CpG dinucleotide"
  misc_feature (61)..(61): /note="Nucleotide may be methylated to form 5-methylcytosine"
tcacccaatctttaaacacatcataaaaatttgctgtgctggggagtgtcataaagtcctcgttagctgaaaggcactcaggggttctgaccgtacccctgcatcctctgcagagcttcctt

SEQ ID NO: 4714 - DNA, 122 bp, Homo sapiens
  misc_feature (61)..(62): /note="This region represents a CpG dinucleotide"
  misc_feature (61)..(61): /note="Nucleotide may be methylated to form 5-methylcytosine"
caatgataaatccaggccgttaatccgtaatgacgtagatcgatccatagtccacattaacggctcctcactttcgagtccggctaatggacatcagttgggacttaaggccaacaaataat

SEQ ID NO: 4715 - DNA, 122 bp, Homo sapiens
  misc_feature (61)..(62): /note="This region represents a CpG dinucleotide"
  misc_feature (61)..(61): /note="Nucleotide may be methylated to form 5-methylcytosine"
acaacccttaggaaagagtaggtgtgcacagatgagcataatctgttagttggccactcccgtatctattctaccttttcctcttagtaacagaactctaatttggagttcacacattgcag

SEQ ID NO: 4716 - DNA, 122 bp, Homo sapiens
  misc_feature (61)..(62): /note="This region represents a CpG dinucleotide"
  misc_feature (61)..(61): /note="Nucleotide may be methylated to form 5-methylcytosine"
gtttattgacaattatttttatcttgtttcattctcttccagtccatgtgtagacatgtccgtatgtattagatgcctttgtatagtttaatttgagtttatatcattttttctgttctttc

SEQ ID NO: 4717 - DNA, 122 bp, Homo sapiens
  misc_feature (61)..(62): /note="This region represents a CpG dinucleotide"
  misc_feature (61)..(61): /note="Nucleotide may be methylated to form 5-methylcytosine"
actctaagaagtttggctgactcaggagggcacaggcttaaactttatcaacatcggagacggccgtgatttgcatcaagttcaatgctgtccttttggcagttgttgcacttaattgagtg

SEQ ID NO: 4718 - DNA, 122 bp, Homo sapiens
  misc_feature (61)..(62): /note="This region represents a CpG dinucleotide"
  misc_feature (61)..(61): /note="Nucleotide may be methylated to form 5-methylcytosine"
cctgctgggcagcattcccaggaggttagacattcttagccacaggatgagataggaggtcggcaggattgatatcacaagatacgggtcataaagaccctggtgataaaacaggatgccat

SEQ ID NO: 4719 - DNA, 122 bp, Homo sapiens
  misc_feature (61)..(62): /note="This region represents a CpG dinucleotide"
  misc_feature (61)..(61): /note="Nucleotide may be methylated to form 5-methylcytosine"
ttgcagtaaaattaaaacattctttctgatgtttgtgctgagtattagctttcagcattgcgatgtctgttttataatgtaggagccaaggttattttggctggtagcaccaaagttccttt

SEQ ID NO: 4720 - DNA, 122 bp, Homo sapiens
  misc_feature (61)..(62): /note="This region represents a CpG dinucleotide"
  misc_feature (61)..(61): /note="Nucleotide may be methylated to form 5-methylcytosine"
ctcctcctcctcctcctccccgtctgtccgtccgtccgtccgtccgcccgcccgcccgcccgcccgcgcttccgtcctgtccagccgccagtcctccagcccgtgtccccgctccgcccgct

SEQ ID NO: 4721 - DNA, 122 bp, Homo sapiens
  misc_feature (61)..(62): /note="This region represents a CpG dinucleotide"
  misc_feature (61)..(61): /note="Nucleotide may be methylated to form 5-methylcytosine"
gagctgccgcgggagccgggagcccgccatgtccgctacgcggcccgctagagcagggcccgccctccgcgtccgcccgcccgcggcagccccaggccccgcctcctcaccgccccgcccgc

SEQ ID NO: 4722 - DNA, 122 bp, Homo sapiens
  misc_feature (61)..(62): /note="This region represents a CpG dinucleotide"
  misc_feature (61)..(61): /note="Nucleotide may be methylated to form 5-methylcytosine"
cgcgggtgtttgtcgcttcgcggggccttgcggcagcatggcgaaccatctgatcagtggcggcaccggctacgtgccccaggactggctcaccgtgcagcagctcttcctcggcgccaact

SEQ ID NO: 4723 - DNA, 122 bp, Homo sapiens
  misc_feature (61)..(62): /note="This region represents a CpG dinucleotide"
  misc_feature (61)..(61): /note="Nucleotide may be methylated to form 5-methylcytosine"
ctaatatctggatctaggaaaattgtctaccgccttgtctgctggatcactcatcacctacgcattttataaaaggctacccaaaaagaaattgttaacaaggaatgttaacaagcctttaa

SEQ ID NO: 4724 - DNA, 122 bp, Homo sapiens
  misc_feature (61)..(62): /note="This region represents a CpG dinucleotide"
  misc_feature (61)..(61): /note="Nucleotide may be methylated to form 5-methylcytosine"
gtcatttggcaatttggtccttgtgtgagcatcatagggcaaacttacacaaacctacatcgtaaggtgtactatgcacctaggcaatatggtacagcctgttgctcttaggctacaaacct

SEQ ID NO: 4725 - DNA, 122 bp, Homo sapiens
  misc_feature (61)..(62): /note="This region represents a CpG dinucleotide"
  misc_feature (61)..(61): /note="Nucleotide may be methylated to form 5-methylcytosine"
aagtgttatttaattgtcacagtttatgagataggcaatattattcctgttttacagctacggaaacaggctcagaaggataaaataacttgcccatgtcacacaataggtgatagagctat

SEQ ID NO: 4726 - DNA, 122 bp, Homo sapiens
  misc_feature (61)..(62): /note="This region represents a CpG dinucleotide"
  misc_feature (61)..(61): /note="Nucleotide may be methylated to form 5-methylcytosine"
tgtcaagtccctgctggtgcaggtttgtctggtagcaccagtgaggtggcccccacccatcgccatcccagaaaccctcccttggacacacctggaaggtgctaagtgcaccgggcagagga

SEQ ID NO: 4727 - DNA, 122 bp, Homo sapiens
  misc_feature (61)..(62): /note="This region represents a CpG dinucleotide"
  misc_feature (61)..(61): /note="Nucleotide may be methylated to form 5-methylcytosine"
ccttctaatagcctccttttacaaaaggagtggaagtttggaactcctgccccagccctgcgccatgctttactttaagcaagacctagctctggttgccacatgcatggttgccacacttt

SEQ ID NO: 4728 - DNA, 122 bp, Homo sapiens
  misc_feature (61)..(62): /note="This region represents a CpG dinucleotide"
  misc_feature (61)..(61): /note="Nucleotide may be methylated to form 5-methylcytosine"
acagcccaagcctggattgtggaggtttttcttgtagagtttgtctttgatagaaagatacggtccagaaggccggcttcaaggacataagaaagggcatattcaaaacaaatacatgtatg

SEQ ID NO: 4729 - DNA, 122 bp, Homo sapiens
  misc_feature (61)..(62): /note="This region represents a CpG dinucleotide"
  misc_feature (61)..(61): /note="Nucleotide may be methylated to form 5-methylcytosine"
cctatgattggcctggctttctgcctgggtgcactttctgaatcagggctggagagccatcgtgagcagagcacagaagtttcactgagttaaggagaccaacactggagtctgataaggca

SEQ ID NO: 4730 - DNA, 122 bp, Homo sapiens
  misc_feature (61)..(62): /note="This region represents a CpG dinucleotide"
  misc_feature (61)..(61): /note="Nucleotide may be methylated to form 5-methylcytosine"
caggcagaacatttaacatcgtcctggccattaatgactaagcctgcgccagctcaaaagcggtcggaaacagacgtcagactatgggacagctaaaacattgattctcagggatgtcgtcc

SEQ ID NO: 4731 - DNA, 122 bp, Homo sapiens
  misc_feature (61)..(62): /note="This region represents a CpG dinucleotide"
  misc_feature (61)..(61): /note="Nucleotide may be methylated to form 5-methylcytosine"
gcattaccacctgagctctgcctcttgtcagatcagcgtaacattagtttctcataggaacgtgaactctggttgtgaactgtgcatgcgaaggatctaggttttgtgctccttatgagaat

SEQ ID NO: 4732 - DNA, 122 bp, Homo sapiens
  misc_feature (61)..(62): /note="This region represents a CpG dinucleotide"
  misc_feature (61)..(61): /note="Nucleotide may be methylated to form 5-methylcytosine"
gcaacaaaggagagacatagagctcgaaaacaataactatgttccgaccatgaagagcttcgtgaatctctcagtcaccgtcagagtacagactctcttttcataatatcttacacctgtaa

SEQ ID NO: 4733 - DNA, 122 bp, Homo sapiens
  misc_feature (61)..(62): /note="This region represents a CpG dinucleotide"
  misc_feature (61)..(61): /note="Nucleotide may be methylated to form 5-methylcytosine"
tcaggtaatccgcccgcctcggcctcccaaagtgctgggattacaggcgttaagtcacctcgcccagcctttgagaaagggattcttcacatgaattgatgtgagcacacccaaaccaacct

SEQ ID NO: 4734 - DNA, 122 bp, Homo sapiens
  misc_feature (61)..(62): /note="This region represents a CpG dinucleotide"
  misc_feature (61)..(61): /note="Nucleotide may be methylated to form 5-methylcytosine"
ctccttgtaccctctccatttatctgtgtcatttgccccatattattatacacttacttgcgagttgctttgtaatcttcttttattggttctagcatttaagttttgtcgccccaactaaa

SEQ ID NO: 4735 - DNA, 122 bp, Homo sapiens
  misc_feature (61)..(62): /note="This region represents a CpG dinucleotide"
  misc_feature (61)..(61): /note="Nucleotide may be methylated to form 5-methylcytosine"
ctcaagtgatccacctgccttggcctcccaagttgctgggattacaggcttgagccaccacgccagccaaacaggatatttaaattaaagccaaaatggccggcgcggtggctcacgcctgt

SEQ ID NO: 4736 - DNA, 122 bp, Homo sapiens
  misc_feature (61)..(62): /note="This region represents a CpG dinucleotide"
  misc_feature (61)..(61): /note="Nucleotide may be methylated to form 5-methylcytosine"
ttaacatagcatttaaagagcggcatgaattagaggaaagacatggaacacacaggtagtcggtttgagatcatcggcttaaaagtatcctaggatggtaatgacccagaagtatttccagt

SEQ ID NO: 4737 - DNA, 122 bp, Homo sapiens
  misc_feature (61)..(62): /note="This region represents a CpG dinucleotide"
  misc_feature (61)..(61): /note="Nucleotide may be methylated to form 5-methylcytosine"
gaatactgtactcttcttgcttccttcaaaatcttagaaccaaagacctcgtcagaataccgttcatagataattaatgcagctccagttgtttaattgcaagacttggccttgatttttgg

SEQ ID NO: 4738 - DNA, 122 bp, Homo sapiens
  misc_feature (61)..(62): /note="This region represents a CpG dinucleotide"
  misc_feature (61)..(61): /note="Nucleotide may be methylated to form 5-methylcytosine"
ggctgctcagtctaactctagaatggatgcttttgaattcatttcgatgtcaccacttttcgctctttaaaaacactgggtcaggtgaggacttgtttcagttcctataactaagtaaaggg

SEQ ID NO: 4739 - DNA, 122 bp, Homo sapiens
  misc_feature (61)..(62): /note="This region represents a CpG dinucleotide"
  misc_feature (61)..(61): /note="Nucleotide may be methylated to form 5-methylcytosine"
aacatggtaaagattgtagctacggtgtcctgttcaccattctatccctagcccctagcacgtattaagggttcaataattgcagactgaatgactgaaaggcatgtttggaagcagaagta

SEQ ID NO: 4740 - DNA, 122 bp, Homo sapiens
  misc_feature (61)..(62): /note="This region represents a CpG dinucleotide"
  misc_feature (61)..(61): /note="Nucleotide may be methylated to form 5-methylcytosine"
aaaacgtggcttatccatacaatggcatatgattcagccttaaaaaagaaatcttgagcacgctacaacagggatgaacctggaggacatcacgctgaatgaaataagccaggcacaaaagg

SEQ ID NO: 4741 - DNA, 122 bp, Homo sapiens
  misc_feature (61)..(62): /note="This region represents a CpG dinucleotide"
  misc_feature (61)..(61): /note="Nucleotide may be methylated to form 5-methylcytosine"
taagatatcccaagtcacacttttaagatatatcaagtcaaactctaaaacatcttggatcgcattaagatatcccagaatcacactcctaagatattcagaatcacacaactactttaaat

SEQ ID NO: 4742 - DNA, 122 bp, Homo sapiens
  misc_feature (61)..(62): /note="This region represents a CpG dinucleotide"
  misc_feature (61)..(61): /note="Nucleotide may be methylated to form 5-methylcytosine"
gttggtgtggcattatataaaatgtggccagttacaggacaaagttccctcattccttctcgtctttcgtgtttctcttcacatatttgttttttcacatatctgatctcacacttgcattt

SEQ ID NO: 4743 - DNA, 122 bp, Homo sapiens
  misc_feature (61)..(62): /note="This region represents a CpG dinucleotide"
  misc_feature (61)..(61): /note="Nucleotide may be methylated to form 5-methylcytosine"
aacaagtaagtccttggcaagtggtggaagttgggacattttgttttcaaaattgttcctcggcttctcccatgtctgtgtacggctgccaaagaacttttggtttattcgtttgcttcttg

SEQ ID NO: 4744 - DNA, 122 bp, Homo sapiens
  misc_feature (61)..(62): /note="This region represents a CpG dinucleotide"
  misc_feature (61)..(61): /note="Nucleotide may be methylated to form 5-methylcytosine"
cttgaagtcagtgagaccaagaacccaccaattctggacataatatgattgaaacaaactcgcaagttgaaggacagtagggagaactgtggtcacctggctagacagcactctagctgcta

SEQ ID NO: 4745 - DNA, 122 bp, Homo sapiens
  misc_feature (61)..(62): /note="This region represents a CpG dinucleotide"
  misc_feature (61)..(61): /note="Nucleotide may be methylated to form 5-methylcytosine"
ttgcttgtctttggcaggactgacctggcatggggctaaacgcatgctgtgtcagatcatcggcgtttccctcaggcctggggctgtgtgtgggaatgtggtctgttgccagctttctgtgc

SEQ ID NO: 4746 - DNA, 122 bp, Homo sapiens
  misc_feature (61)..(62): /note="This region represents a CpG dinucleotide"
  misc_feature (61)..(61): /note="Nucleotide may be methylated to form 5-methylcytosine"
tactcaggaggctaaggcagaaggatcacttgaaccagggaattcaagaccagcctgggccgcttagtgagagcctgtctcttaaaaaaagaaaaagaaaaagaaaaaaaaggaatcaaagc

SEQ ID NO: 4747 - DNA, 122 bp, Homo sapiens
  misc_feature (61)..(62): /note="This region represents a CpG dinucleotide"
  misc_feature (61)..(61): /note="Nucleotide may be methylated to form 5-methylcytosine"
gaaacacttgttgattttctcttttgaaatcacacacggtgcagccacaggaacccaaggcgagccactcgccaactcagaagtgatcccaatcgtctaatgctgcctggccccagtgcttc

SEQ ID NO: 4748 - DNA, 122 bp, Homo sapiens
  misc_feature (61)..(62): /note="This region represents a CpG dinucleotide"
  misc_feature (61)..(61): /note="Nucleotide may be methylated to form 5-methylcytosine"
tgaagccatccaagaacaactagacaggcatctgtaaagaatgctttgcaaagtgaaaaacggccacgtggtttcttttgttgctgttgtcattgttctgccaagtgaaaagcaaatgatgc

SEQ ID NO: 4749 - DNA, 122 bp, Homo sapiens
  misc_feature (61)..(62): /note="This region represents a CpG dinucleotide"
  misc_feature (61)..(61): /note="Nucleotide may be methylated to form 5-methylcytosine"
attaaagctgagtgttttcttggaaaatgtcctgcatgtgttgaaattaaaagcctttggcgaaggctttaagctcacagtgaattctggtgtgttacctgcacctgccagcagccttgctt

SEQ ID NO: 4750 - DNA, 122 bp, Homo sapiens
  misc_feature (61)..(62): /note="This region represents a CpG dinucleotide"
  misc_feature (61)..(61): /note="Nucleotide may be methylated to form 5-methylcytosine"
tcataccctagcctggaactactaaatctgtctgcattttaaccagatccccaggtgatccgatgcattggaaagtgtgagaaggcctgggcggggataggaggatgaacctgcaacaggaa

SEQ ID NO: 4751 - DNA, 122 bp, Homo sapiens
  misc_feature (61)..(62): /note="This region represents a CpG dinucleotide"
  misc_feature (61)..(61): /note="Nucleotide may be methylated to form 5-methylcytosine"
ctacgccgctgatatgtctatatatcccttgcagggcagcgacggaccccctgggaaacccggaccacctggaccacctgtgagttgttctaggcttaaaatttaaaattcatgtgtttact

SEQ ID NO: 4752 - DNA, 122 bp, Homo sapiens
  misc_feature (61)..(62): /note="This region represents a CpG dinucleotide"
  misc_feature (61)..(61): /note="Nucleotide may be methylated to form 5-methylcytosine"
cttgctctgaataggattcttcagatatcaactaaccatccctgtggagcagattcgccccgtgcatgcatgtacatatcacatagcctatgcatatttgaaataaatttcagtataatgtc

SEQ ID NO: 4753 - DNA, 122 bp, Homo sapiens
  misc_feature (61)..(62): /note="This region represents a CpG dinucleotide"
  misc_feature (61)..(61): /note="Nucleotide may be methylated to form 5-methylcytosine"
gatattcattcctcaggaagaaattccttctcagcaggactcatccgaaccatggcaaggcgacacaagtgaaaggcatggacagaccacatgatttgctcagtcaatggagctttcaaaat

SEQ ID NO: 4754 - DNA, 122 bp, Homo sapiens
  misc_feature (61)..(62): /note="This region represents a CpG dinucleotide"
  misc_feature (61)..(61): /note="Nucleotide may be methylated to form 5-methylcytosine"
cagaagtctttatagaggccaaagtcatctccaataatcctgaatgagtcaaagttcatccgctagccactttctcattgggaaagtctgccctggagaaggttaactctcctgtacatttg

SEQ ID NO: 4755 - DNA, 122 bp, Homo sapiens
  misc_feature (61)..(62): /note="This region represents a CpG dinucleotide"
  misc_feature (61)..(61): /note="Nucleotide may be methylated to form 5-methylcytosine"
ggaaagaaagtcaacatgttaatggctctgcctgtttgcagtgttaactggctcacaagacggagaaggattatgctctgacacttgtgtatccttgctgaacttggaatgcgacagctcag

SEQ ID NO: 4756 - DNA, 122 bp, Homo sapiens
  misc_feature (61)..(62): /note="This region represents a CpG dinucleotide"
  misc_feature (61)..(61): /note="Nucleotide may be methylated to form 5-methylcytosine"
atttaaattgctaaaatgtattctaccgaatggtgtaggtagttcaaacgcctttccacccgttgttggatatttaaaggacttgtcaatttatcgcttctgtaacatttacacgctttgtg

SEQ ID NO: 4757 - DNA, 122 bp, Homo sapiens
  misc_feature (61)..(62): /note="This region represents a CpG dinucleotide"
  misc_feature (61)..(61): /note="Nucleotide may be methylated to form 5-methylcytosine"
gtaagtgcactctatgatgttcccacaatggcaaaatcaccgatgacacatttcttagaacgtatccctgtcattaagcgacacataactctctatatatcacactaggatcactgaaagct

SEQ ID NO: 4758 - DNA, 122 bp, Homo sapiens
  misc_feature (61)..(62): /note="This region represents a CpG dinucleotide"
  misc_feature (61)..(61): /note="Nucleotide may be methylated to form 5-methylcytosine"
tcttttctggggtgtgtgtgtgtgtgtgtgtgtgtgtgtgtgtgtgtattttgtaccatgcgaatttattatattacctttggaggaaagggggataaaactagtctggccaaggctaataa

SEQ ID NO: 4759 - DNA, 122 bp, Homo sapiens
  misc_feature (61)..(62): /note="This region represents a CpG dinucleotide"
  misc_feature (61)..(61): /note="Nucleotide may be methylated to form 5-methylcytosine"
tacatgacgtagcctgaatttctaccctgcctaaactttgcttatctttaagaaacagaacgcctgtgataaaaagtttcctttgtaactaggcaagctgagactagttagaaccaaggtag

SEQ ID NO: 4760 - DNA, 122 bp, Homo sapiens
  misc_feature (61)..(62): /note="This region represents a CpG dinucleotide"
  misc_feature (61)..(61): /note="Nucleotide may be methylated to form 5-methylcytosine"
gtcctgtttccacggagagaggagcaactctccaggcctaaaggatctccagctgagccacgaagagcttatcacatcaagagcaaatgcagcagacgaaggcagtgccttctgtgaaatga

SEQ ID NO: 4761 - DNA, 122 bp, Homo sapiens
  misc_feature (61)..(62): /note="This region represents a CpG dinucleotide"
  misc_feature (61)..(61): /note="Nucleotide may be methylated to form 5-methylcytosine"
cctgaaagccctgctttttccaacagttccattgtgaacgtgcctggtgagtctactcttcgccgagatttcctgagactgcagcaggagaacaaggaacgttccgaggctcttcggagaca

SEQ ID NO: 4762 - DNA, 122 bp, Homo sapiens
  misc_feature (61)..(62): /note="This region represents a CpG dinucleotide"
  misc_feature (61)..(61): /note="Nucleotide may be methylated to form 5-methylcytosine"
tgtgtcaggaagacatcatgcccagatctgtgaaactatggaatagatgtcagggaaatgcgggtccatctgctaaacagatgactgaatgattaagtgaatagtgaaaaggagaattccaa

SEQ ID NO: 4763 - DNA, 122 bp, Homo sapiens
  misc_feature (61)..(62): /note="This region represents a CpG dinucleotide"
  misc_feature (61)..(61): /note="Nucleotide may be methylated to form 5-methylcytosine"
ccagtgctgctgacacctgccatgcacgtcagcatcttcatctgatgtcctcaggggagccggctgcacctcacaccatccactctgcaaagcaaagcagccctgggaacagccctggaaaa

SEQ ID NO: 4764 - DNA, 122 bp, Homo sapiens
  misc_feature (61)..(62): /note="This region represents a CpG dinucleotide"
  misc_feature (61)..(61): /note="Nucleotide may be methylated to form 5-methylcytosine"
atgagtgggtgcctgcaagcctgagagcatgaaccctatctaaggaacagctgccactggcggcatacaagcttgctctggcccaggctccccaggtctcaggaagcactgcacgttcccac

SEQ ID NO: 4765 - DNA, 122 bp, Homo sapiens
  misc_feature (61)..(62): /note="This region represents a CpG dinucleotide"
  misc_feature (61)..(61): /note="Nucleotide may be methylated to form 5-methylcytosine"
ttacgggtcgagaaataatcctctatatctagattaaagtctgtgttttgaccattaccgcgcactgagcattgagccaacagtttaattgagctgtttatgccgctgccttgatctcttcc

SEQ ID NO: 4766 - DNA, 122 bp, Homo sapiens
  misc_feature (61)..(62): /note="This region represents a CpG dinucleotide"
  misc_feature (61)..(61): /note="Nucleotide may be methylated to form 5-methylcytosine"
ttcagaatctggagataaggacatggacatctttgaggcaccattattctgcccaccacacggggttactttcccatgatatcagagcactctccaacctgctcaataacagagcctccttt

SEQ ID NO: 4767 - DNA, 122 bp, Homo sapiens
  misc_feature (61)..(62): /note="This region represents a CpG dinucleotide"
  misc_feature (61)..(61): /note="Nucleotide may be methylated to form 5-methylcytosine"
ttctgtgttgcccttagggtcctgagggccttgcctagaataatcctcatataattcctccgacaggaaagctgtgctttcttccatggctgcattctaaataacaaaggcatgatactata

SEQ ID NO: 4768 - DNA, 122 bp, Homo sapiens
  misc_feature (61)..(62): /note="This region represents a CpG dinucleotide"
  misc_feature (61)..(61): /note="Nucleotide may be methylated to form 5-methylcytosine"
gtctgtgtggaatgggcagcaagttataaggaatagtttcattactcctctcggctatatcggaaaccaaattaccaagtgaattctccacccagtaggaaagaagagactgtctgtcttac

SEQ ID NO: 4769 - DNA, 122 bp, Homo sapiens
  misc_feature (61)..(62): /note="This region represents a CpG dinucleotide"
  misc_feature (61)..(61): /note="Nucleotide may be methylated to form 5-methylcytosine"
caatgaggcagaatcagttcaaaggtcagtctgacccaaaggattcaaatcccatctgtgcgtcacacaaacaaatcattagcaaactgcatccttctgctctgcagctatccagtcttggc

SEQ ID NO: 4770 - DNA, 122 bp, Homo sapiens
  misc_feature (61)..(62): /note="This region represents a CpG dinucleotide"
  misc_feature (61)..(61): /note="Nucleotide may be methylated to form 5-methylcytosine"
ggacacacggggcggggactgggcgggcacgggcagggtggcagtaccttggcctcccgccgccggctctcctcgtcctcctcgtgctccaccacgccctggctcaggttggtgtagttggc

SEQ ID NO: 4771 - DNA, 122 bp, Homo sapiens
  misc_feature (61)..(62): /note="This region represents a CpG dinucleotide"
  misc_feature (61)..(61): /note="Nucleotide may be methylated to form 5-methylcytosine"
gctgggagtgcatgtggggcaggcctgaccggctgggcacgttctgaggggttgtctgaacgctgacagctgctgcatgggaaccagagcctggaggatgcagaactgtggagataagaagg

SEQ ID NO: 4772 - DNA, 122 bp, Homo sapiens
  misc_feature (61)..(62): /note="This region represents a CpG dinucleotide"
  misc_feature (61)..(61): /note="Nucleotide may be methylated to form 5-methylcytosine"
ctattgttcctgaaaaaccagatactccaggaggcggatagatgactagggaatggacagcgcaatgaatgttgattgggcatgcacagtacacaggcactgcactgatttctttccatgag

SEQ ID NO: 4773 - DNA, 122 bp, Homo sapiens
  misc_feature (61)..(62): /note="This region represents a CpG dinucleotide"
  misc_feature (61)..(61): /note="Nucleotide may be methylated to form 5-methylcytosine"
gtgggaggacacgtgcctagcatttttacaatatgccttttcttttagccctgaatctaccgtgtcgagggcattcttttgtgtatctggtggctcttaggagtttgggatctaatagtacc

SEQ ID NO: 4774 - DNA, 122 bp, Homo sapiens
  misc_feature (61)..(62): /note="This region represents a CpG dinucleotide"
  misc_feature (61)..(61): /note="Nucleotide may be methylated to form 5-methylcytosine"
agaaacagttgttctatgttctccactgtcagcactctactacagataccccatctggtgcggtctgatatggataataatggtggagtgttcttgctgtcttgactgtagtcattactgtg

SEQ ID NO: 4775 - DNA, 122 bp, Homo sapiens
  misc_feature (61)..(62): /note="This region represents a CpG dinucleotide"
  misc_feature (61)..(61): /note="Nucleotide may be methylated to form 5-methylcytosine"
acatgctagatccaacgatctttaagctcagaattttttccttcattggctgagctgccacggcacaggatttgttcatttattggctgggtctggggcaccatgacccagagtggaacttg

SEQ ID NO: 4776 - DNA, 122 bp, Homo sapiens
  misc_feature (61)..(62): /note="This region represents a CpG dinucleotide"
  misc_feature (61)..(61): /note="Nucleotide may be methylated to form 5-methylcytosine"
cttccagcttctcttggcactcccagaaccagccttgcctgctgaatgccagttctgaagcggatatcaagatactgtctaagaaggtctagaatggcatccaaaatgtgttcatcgggttc

SEQ ID NO: 4777 - DNA, 122 bp, Homo sapiens
  misc_feature (61)..(62): /note="This region represents a CpG dinucleotide"
  misc_feature (61)..(61): /note="Nucleotide may be methylated to form 5-methylcytosine"
tcttgagttactcatgtactatgcactgtactaggcactggggacacatgcagacaaacacgtttatgtattcacatatagtgtaaaatactaattgatgtgttgtagactatcctatttct

SEQ ID NO: 4778 - DNA, 122 bp, Homo sapiens
  misc_feature (61)..(62): /note="This region represents a CpG dinucleotide"
  misc_feature (61)..(61): /note="Nucleotide may be methylated to form 5-methylcytosine"
gggtgcagagggtggatttgcttgcttgtcctagctcacacagctagtgggtggtggatccgtgctcttgaccaccccactctgttgcctttctgttagacaacaccttgtctactttctct

SEQ ID NO: 4779 - DNA, 122 bp, Homo sapiens
  misc_feature (61)..(62): /note="This region represents a CpG dinucleotide"
  misc_feature (61)..(61): /note="Nucleotide may be methylated to form 5-methylcytosine"
taatgttttgtctgaatagcgtaagggtaacttacatacacctgtgtcctttaccccaaacgctttcctaggtattttgtggcatgtatgtatgtaacattacataactcttacatagccac

SEQ ID NO: 4780 - DNA, 122 bp, Homo sapiens
  misc_feature (61)..(62): /note="This region represents a CpG dinucleotide"
  misc_feature (61)..(61): /note="Nucleotide may be methylated to form 5-methylcytosine"
tttgtgtcaggcttctttcatttaccgcagtgttttcaaggttcatccaggttgtaaacacgcatgagtactttgtgacttctaaggatgaataatattccattgcgtggaaataccacata

SEQ ID NO: 4781 - DNA, 122 bp, Homo sapiens
  misc_feature (61)..(62): /note="This region represents a CpG dinucleotide"
  misc_feature (61)..(61): /note="Nucleotide may be methylated to form 5-methylcytosine"
ttcacaaagcagatccaaatgggaagagaaatagaagtataatatgaaatacgggaagggcgaagatgagaggatagttgtttcatcattggggaatcttttaataagatgccaaaaaaaat

SEQ ID NO: 4782 - DNA, 122 bp, Homo sapiens
  misc_feature (61)..(62): /note="This region represents a CpG dinucleotide"
  misc_feature (61)..(61): /note="Nucleotide may be methylated to form 5-methylcytosine"
cgcactcgctctgcgcccgggtctcggcgcgcgcggaaacccaggccgcgggctcccctccgccccgccggcccgcgtgcagcattaaatattcatagggatgctactttcttaaaggagaa

SEQ ID NO: 4783 - DNA, 122 bp, Homo sapiens
  misc_feature (61)..(62): /note="This region represents a CpG dinucleotide"
  misc_feature (61)..(61): /note="Nucleotide may be methylated to form 5-methylcytosine"
aatcttgttctgctctctcattttacaaatgattaatgcatcccttttcaactactccagcgctgttgctgctgcaatgttagcaaatgcaagccagagagaagcacttgaaaatcctttga

SEQ ID NO: 4784 - DNA, 122 bp, Homo sapiens
  misc_feature (61)..(62): /note="This region represents a CpG dinucleotide"
  misc_feature (61)..(61): /note="Nucleotide may be methylated to form 5-methylcytosine"
agctgggggctgggagacccactccagctgacctctccctcagacttctcctgacctgctcgcaccgctttgatgtacagccctttgttccaggactttggggtttcctcggatctctgttt

SEQ ID NO: 4785 - DNA, 122 bp, Homo sapiens
  misc_feature (61)..(62): /note="This region represents a CpG dinucleotide"
  misc_feature (61)..(61): /note="Nucleotide may be methylated to form 5-methylcytosine"
cacttaggctggagtgcagtggcgtaatcatagctccctgtggccctgacctcctgggttcgagcaatcctccagcctcagcctcctgagtagctgagactacaggcatatgccactgcacc

SEQ ID NO: 4786 - DNA, 122 bp, Homo sapiens
  misc_feature (61)..(62): /note="This region represents a CpG dinucleotide"
  misc_feature (61)..(61): /note="Nucleotide may be methylated to form 5-methylcytosine"
acctgatactggagtctcataaccagactcgcgaagtaggaaggaagcctccttgcagggcggttccaccacagtatgagcggccacagaaaaagttaccctgagtgttccgtgctgcaccg

SEQ ID NO: 4787 - DNA, 122 bp, Homo sapiens
  misc_feature (61)..(62): /note="This region represents a CpG dinucleotide"
  misc_feature (61)..(61): /note="Nucleotide may be methylated to form 5-methylcytosine"
aagctcctcccatcaagaggtggagtctatttcctcatccttgaatctggactcacactgcgatttgctttgaccaacagaatataggggaaggaatgttgtggaaattctgaaccttggcc

SEQ ID NO: 4788 - DNA, 122 bp, Homo sapiens
  misc_feature (61)..(62): /note="This region represents a CpG dinucleotide"
  misc_feature (61)..(61): /note="Nucleotide may be methylated to form 5-methylcytosine"
gcaggtatggtggggacgggtgtcaaaccttcataagcaagcacgctcaagacagtgtcacggaagacacaggaaaacagagcctgtggataccaaacaaccgagagctaatccacagtcag

SEQ ID NO: 4789 - DNA, 122 bp, Homo sapiens
  misc_feature (61)..(62): /note="This region represents a CpG dinucleotide"
  misc_feature (61)..(61): /note="Nucleotide may be methylated to form 5-methylcytosine"
tgggactggcctttataagaagaaaagagacctgagcaaggatgttaagccctttcaccacgtgatgccctgtgccacctcaggactgtgcagagtccctagcagcaagaaaaccctcacga

SEQ ID NO: 4790 - DNA, 122 bp, Homo sapiens
  misc_feature (61)..(62): /note="This region represents a CpG dinucleotide"
  misc_feature (61)..(61): /note="Nucleotide may be methylated to form 5-methylcytosine"
ttccccaaatgctctggtctcttcaaactttactttttttttttgcattcgataaaggtacgcaattcaatgcaaagaagagctagggaggaaaattgagagcattttagcagacaggtgga

SEQ ID NO: 4791 - DNA, 122 bp, Homo sapiens
  misc_feature (61)..(62): /note="This region represents a CpG dinucleotide"
  misc_feature (61)..(61): /note="Nucleotide may be methylated to form 5-methylcytosine"
ctttttcaaattaaaaatcctgaaaagcctgtggaatgctgtttacttgtgctcttgcaacgggactggcctgcctgaaatgtctgcggaccatgaccacccacactatgggaagcatgatg

SEQ ID NO: 4792 - DNA, 122 bp, Homo sapiens
  misc_feature (61)..(62): /note="This region represents a CpG dinucleotide"
  misc_feature (61)..(61): /note="Nucleotide may be methylated to form 5-methylcytosine"
tgctttatttagttcatttggtgaggtcatgctttcccggttggtgttgatgctagttgacgttcttcagtatctgggcattgtagagttaggtatttattgttgtcttcaccgtctgggct

SEQ ID NO: 4793 - DNA, 122 bp, Homo sapiens
  misc_feature (61)..(62): /note="This region represents a CpG dinucleotide"
  misc_feature (61)..(61): /note="Nucleotide may be methylated to form 5-methylcytosine"
actgtcactcactagataccatcaccttatatggagtaagactggaaattgtcttagatacgtccttacttccaacattgtctctctcccagcaagaggctatgtgaggaactaagaacaag

SEQ ID NO: 4794 - DNA, 122 bp, Homo sapiens
  misc_feature (61)..(62): /note="This region represents a CpG dinucleotide"
  misc_feature (61)..(61): /note="Nucleotide may be methylated to form 5-methylcytosine"
agatttttctgtgtgtaaaccccatgcacatatgaacacctacttaagtgcatatggtaccgtatctggtgcctgccctcagacagaaccaagatatgtgtggaaaccttgtctgcacacaa

SEQ ID NO: 4795 - DNA, 122 bp, Homo sapiens
  misc_feature (61)..(62): /note="This region represents a CpG dinucleotide"
  misc_feature (61)..(61): /note="Nucleotide may be methylated to form 5-methylcytosine"
aacacacaaaaaaagcctctcttacgtggtatctaagtacagcatatggactttctggtccgcaagaagagaacgttccatgctgggatctgctctgaagtctcccgtgtgtaatatgacag

SEQ ID NO: 4796 - DNA, 122 bp, Homo sapiens
  misc_feature (61)..(62): /note="This region represents a CpG dinucleotide"
  misc_feature (61)..(61): /note="Nucleotide may be methylated to form 5-methylcytosine"
tttgcagccagcaatgaagttctgcccacagtttacgtttacgactttcttctgaactgccgtatttatgttactgttttcatcactactctttttttgtacattttaccacttaaacagta

SEQ ID NO: 4797 - DNA, 122 bp, Homo sapiens
  misc_feature (61)..(62): /note="This region represents a CpG dinucleotide"
  misc_feature (61)..(61): /note="Nucleotide may be methylated to form 5-methylcytosine"
caaagttttgagtgattcacccaaagttttgtggctaataaaactccattccagcccaggcgcagtggctcatgcctgtaatcccaacacttcgggaggccgaggcaggcagatcacttgag

SEQ ID NO: 4798 - DNA, 122 bp, Homo sapiens
  misc_feature (61)..(62): /note="This region represents a CpG dinucleotide"
  misc_feature (61)..(61): /note="Nucleotide may be methylated to form 5-methylcytosine"
taactaagccaaaatgcctataatgccaacattaaaattcctggaatagctcttttagttcgcagcaggagggtagactacacaacctggtttgctatcagatcaaacaaacaaaaatcttc

SEQ ID NO: 4799 - DNA, 122 bp, Homo sapiens
  misc_feature (61)..(62): /note="This region represents a CpG dinucleotide"
  misc_feature (61)..(61): /note="Nucleotide may be methylated to form 5-methylcytosine"
atcctgaagccgggatgtaagtctagcctttggctccctgttgcttgagctagctctggtcgtactttcatacatttgtctacagatgctgttacaaaactcacacaccaatgactatatct

SEQ ID NO: 4800 - DNA, 122 bp, Homo sapiens
  misc_feature (61)..(62): /note="This region represents a CpG dinucleotide"
  misc_feature (61)..(61): /note="Nucleotide may be methylated to form 5-methylcytosine"
gatcacacagctagtaaaactaaaactaaactcggctaatcaggctctaaagtctgtgcccgtagcctcacaatatgctgcccattgaaatcagacagacagatgagatgtggtatgacctc

SEQ ID NO: 4801 - DNA, 122 bp, Homo sapiens
  misc_feature (61)..(62): /note="This region represents a CpG dinucleotide"
  misc_feature (61)..(61): /note="Nucleotide may be methylated to form 5-methylcytosine"
ctcaagtagtactgccatctcagcctcccagagtgtgggggttataggtgtgagccaccacgcctggcctactatgagaaatctgtatggtcagcacattcttgccccatgggcaagcctat

SEQ ID NO: 4802 - DNA, 122 bp, Homo sapiens
  misc_feature (61)..(62): /note="This region represents a CpG dinucleotide"
  misc_feature (61)..(61): /note="Nucleotide may be methylated to form 5-methylcytosine"
ctatttaccaaaatttaaaatgttgaaaacagttccacctctgtccgtagctcactgtagcgtgaagagaaggaagcacttgtgtgttgaagattcagaagggaggaggtgtcggggtgccc

SEQ ID NO: 4803 - DNA, 122 bp, Homo sapiens
  misc_feature (61)..(62): /note="This region represents a CpG dinucleotide"
  misc_feature (61)..(61): /note="Nucleotide may be methylated to form 5-methylcytosine"
agaccgtactagacttacacatatacacacaggtgagtgctgagtatcccttattggaaacgcttgggaccaagtgtctgggatttccagattttcaggttgtcagaatatctgtattacgt

SEQ ID NO: 4804 - DNA, 122 bp, Homo sapiens
  misc_feature (61)..(62): /note="This region represents a CpG dinucleotide"
  misc_feature (61)..(61): /note="Nucleotide may be methylated to form 5-methylcytosine"
tgttagtcaccttagagtaggtgactgacccgtccacctgtttagatcataaaccctacacgggcaagggcctactctgacatggtatcatgttcttagcacccagcagggagccctgcccc

SEQ ID NO: 4805 - DNA, 122 bp, Homo sapiens
  misc_feature (61)..(62): /note="This region represents a CpG dinucleotide"
  misc_feature (61)..(61): /note="Nucleotide may be methylated to form 5-methylcytosine"
gtgttttcgctggccccgggcagtctgtcctgcctcagttacaggggagagcacacacagcgggtggcagccaacacagtttactgtcaccacaggaatgcagatttctagcaagaaatata

SEQ ID NO: 4806 - DNA, 122 bp, Homo sapiens
  misc_feature (61)..(62): /note="This region represents a CpG dinucleotide"
  misc_feature (61)..(61): /note="Nucleotide may be methylated to form 5-methylcytosine"
ctgacttctcacctgaactctgccgttgacggctttgactctgagttttgcaaggccttgcgtgcctatgctggctgcacccagcgaacttcaaaagcctgccgtggcaacctggtatacca

SEQ ID NO: 4807 - DNA, 122 bp, Homo sapiens
  misc_feature (61)..(62): /note="This region represents a CpG dinucleotide"
  misc_feature (61)..(61): /note="Nucleotide may be methylated to form 5-methylcytosine"
agcagccagctcatcccagtgactcacaggacacagccatccagcggcatctttccttgtcgaatgatactgtaatgaccttccaaagtgaagagtagcacattaaagtgattttattgttt

SEQ ID NO: 4808 - DNA, 122 bp, Homo sapiens
  misc_feature (61)..(62): /note="This region represents a CpG dinucleotide"
  misc_feature (61)..(61): /note="Nucleotide may be methylated to form 5-methylcytosine"
gtaattataaaaacaatattctcactgagttaggctgcttctgtggtcttcattcacattcgctgaagtcacagaaacgggaaacatcatattgcataatctctcacacacacatgcacaca

SEQ ID NO: 4809 - DNA, 122 bp, Homo sapiens
  misc_feature (61)..(62): /note="This region represents a CpG dinucleotide"
  misc_feature (61)..(61): /note="Nucleotide may be methylated to form 5-methylcytosine"
tgggtcacactttaatgacaacaatatagttattctagatcagagacttggaagggactacggcttgagacatatgagtgtgtctcaaggaactggaccagttttagcataagattttccaa

SEQ ID NO: 4810 - DNA, 122 bp, Homo sapiens
  misc_feature (61)..(62): /note="This region represents a CpG dinucleotide"
  misc_feature (61)..(61): /note="Nucleotide may be methylated to form 5-methylcytosine"
tgggtgatagagtgagaacctgtctcaaaacagacaaaaattttcactgatgagaacttacgcaaggtcacagaactacaaagtggcagagtcggaattaaaaaccaagtgtgtgcaaactc

SEQ ID NO: 4811 - DNA, 122 bp, Homo sapiens
  misc_feature (61)..(62): /note="This region represents a CpG dinucleotide"
  misc_feature (61)..(61): /note="Nucleotide may be methylated to form 5-methylcytosine"
actgggtctacctggataatccaggataatctccctgtctcagagttcttaacatcatcacgcctgcaaaatccctcttgccttatgaggtaacatattcacaggttctggggattagggcg

SEQ ID NO: 4812 - DNA, 122 bp, Homo sapiens
  misc_feature (61)..(62): /note="This region represents a CpG dinucleotide"
  misc_feature (61)..(61): /note="Nucleotide may be methylated to form 5-methylcytosine"
agtatagagatctgcccattgtctctttgagtatagacctgcccatctggttctgcagagcgcattaactatgtaacttcaggtcattttacctttttgaacttcggtctcctcatttgtga

SEQ ID NO: 4813 - DNA, 122 bp, Homo sapiens
  misc_feature (61)..(62): /note="This region represents a CpG dinucleotide"
  misc_feature (61)..(61): /note="Nucleotide may be methylated to form 5-methylcytosine"
acctcgtgatccgcccatctcggcctcccaaagtgctaggattacaggagtgagccaccgcgcccggccacacattgtaacattttatttcctcatgagggaggagtctgggtgaggttaag

SEQ ID NO: 4814 - DNA, 122 bp, Homo sapiens
  misc_feature (61)..(62): /note="This region represents a CpG dinucleotide"
  misc_feature (61)..(61): /note="Nucleotide may be methylated to form 5-methylcytosine"
cactttacacgataaatagataaaatgaagtgtttttctttttcagtgtattcagtcaggcgataaacatgatcaagcaccaagtctttgccaggtgatgttttaggttctgggaactctat

SEQ ID NO: 4815 - DNA, 122 bp, Homo sapiens
  misc_feature (61)..(62): /note="This region represents a CpG dinucleotide"
  misc_feature (61)..(61): /note="Nucleotide may be methylated to form 5-methylcytosine"
ccagcctgtcttgcaggttgagtagggttgtgcgcttgggatctctgatcagaccggcaccgcagtgtgggagagaagctgtgtgaagagtctgtcgtctgactttggcaagggttcctctg

SEQ ID NO: 4816 - DNA, 122 bp, Homo sapiens
  misc_feature (61)..(62): /note="This region represents a CpG dinucleotide"
  misc_feature (61)..(61): /note="Nucleotide may be methylated to form 5-methylcytosine"
caagacatcacagcaactttccaaatgcctccttagtaaacgtggtttacagtttacagtcgactcaccgtccctgacctcctccctgcattgtgtggaatgtagacaagcaatgtttcact

SEQ ID NO: 4817 - DNA, 122 bp, Homo sapiens
  misc_feature (61)..(62): /note="This region represents a CpG dinucleotide"
  misc_feature (61)..(61): /note="Nucleotide may be methylated to form 5-methylcytosine"
gctgccaggtcatttgccaactgagtcaccttatctagctttgcagttgcttcatgcaagcgctcttcatatagagtacagagtttctcagcatttgcctataagttgagaaagaagggctg

SEQ ID NO: 4818 - DNA, 122 bp, Homo sapiens
  misc_feature (61)..(62): /note="This region represents a CpG dinucleotide"
  misc_feature (61)..(61): /note="Nucleotide may be methylated to form 5-methylcytosine"
ttgctgagccctggtttcctcatctgtcaaatgggcttaaggccctctgcctgatatgggcgtgataggagaggccagaagagggcgcgtggacgatgatggccgggcctcggtggcagtat

SEQ ID NO: 4819 - DNA, 122 bp, Homo sapiens
  misc_feature (61)..(62): /note="This region represents a CpG dinucleotide"
  misc_feature (61)..(61): /note="Nucleotide may be methylated to form 5-methylcytosine"
attagtagtggggaaaaattaattacatattaaatgcagctctgttcttgcctaatccatcgtaaaagcaagtcccaaagagtcaaactttgtccgagtcccttagccacatgttataacaa

SEQ ID NO: 4820 - DNA, 122 bp, Homo sapiens
  misc_feature (61)..(62): /note="This region represents a CpG dinucleotide"
  misc_feature (61)..(61): /note="Nucleotide may be methylated to form 5-methylcytosine"
tacatcgctgcaggcaaaataatgccaaatggacagacatctcaaaatgcattcctctctcgtccaaagatttcacctcagatcgctcagagatgttttttcttttatgcaagttaaaaatg

SEQ ID NO: 4821 - DNA, 122 bp, Homo sapiens
  misc_feature (61)..(62): /note="This region represents a CpG dinucleotide"
  misc_feature (61)..(61): /note="Nucleotide may be methylated to form 5-methylcytosine"
aaccatagtacactggattttatgtttaagcagcactgatcctcgatagttcagaactcccgcactgaagtccagcgtaggcaggtaaggacaacctggagccaggcattaatactcacttc

SEQ ID NO: 4822 - DNA, 122 bp, Homo sapiens
  misc_feature (61)..(62): /note="This region represents a CpG dinucleotide"
  misc_feature (61)..(61): /note="Nucleotide may be methylated to form 5-methylcytosine"
ataaaccaccttggagtggtgccccctggagttgtgcaatgtggcagccctgagtatcggcgctagattttatacccgagttcatctgcctcaaaagcctgagctacttgcactatgctaag

SEQ ID NO: 4823 - DNA, 122 bp, Homo sapiens
  misc_feature (61)..(62): /note="This region represents a CpG dinucleotide"
  misc_feature (61)..(61): /note="Nucleotide may be methylated to form 5-methylcytosine"
tgggattccacttacccatccttgattttatttgtcctctccacattgtcaatgtccattcggatcttgtacttgacatgatggggcagctcaatgctgcctggagtaattccagtgaacac

SEQ ID NO: 4824 - DNA, 122 bp, Homo sapiens
  misc_feature (61)..(62): /note="This region represents a CpG dinucleotide"
  misc_feature (61)..(61): /note="Nucleotide may be methylated to form 5-methylcytosine"
tcgccttcttcattggcggaagctgggagccgagagagtgagccgtgcgcagatgtgcggcggtggaggtggcttttgtttctcctccgcgccccctccccccccgccccgcacattgcctg

SEQ ID NO: 4825 - DNA, 122 bp, Homo sapiens
  misc_feature (61)..(62): /note="This region represents a CpG dinucleotide"
  misc_feature (61)..(61): /note="Nucleotide may be methylated to form 5-methylcytosine"
ccggctcctgtttgtatgggctctagactgctgactgggtcccaactctgcattcagtgacgtcatgttgcagcttcacattggtcgtgttagaggtaattatactggcaaacaggcaaatg

SEQ ID NO: 4826 - DNA, 122 bp, Homo sapiens
  misc_feature (61)..(62): /note="This region represents a CpG dinucleotide"
  misc_feature (61)..(61): /note="Nucleotide may be methylated to form 5-methylcytosine"
aaaaggtgatctatccttacagtgaaagattattaagctatagaagaaattgttcatacacgctacaacatgaaggaggcttgaagacattttgctaagtgaaagaagccagtcagggagga

SEQ ID NO: 4827 - DNA, 122 bp, Homo sapiens
  misc_feature (61)..(62): /note="This region represents a CpG dinucleotide"
  misc_feature (61)..(61): /note="Nucleotide may be methylated to form 5-methylcytosine"
ttcaggatattcaggaaggaaactaatgctggagacaatagaggaagccagtgccaagggcgtcagatgcccctgaagggtctaagtaaaattgcaaagtgggagaactttacctgccttct

SEQ ID NO: 4828 - DNA, 122 bp, Homo sapiens
  misc_feature (61)..(62): /note="This region represents a CpG dinucleotide"
  misc_feature (61)..(61): /note="Nucleotide may be methylated to form 5-methylcytosine"
aagtgggggagagaggtcagtatcaaatgttttagacttgcagtgcccacacctgcctaccgtcccgttaatagagagcagacggttccaccggaatgtccctggccttgcaagcatttcag

SEQ ID NO: 4829 - DNA, 122 bp, Homo sapiens
  misc_feature (61)..(62): /note="This region represents a CpG dinucleotide"
  misc_feature (61)..(61): /note="Nucleotide may be methylated to form 5-methylcytosine"
gcattaataaattaagttttattggaacacagtcatgttcattcattcatctattgtctacggctgaggtttgtagttgaaatagagactttacggcctgccatgcctaaaatatttactat

SEQ ID NO: 4830 - DNA, 122 bp, Homo sapiens
  misc_feature (61)..(62): /note="This region represents a CpG dinucleotide"
  misc_feature (61)..(61): /note="Nucleotide may be methylated to form 5-methylcytosine"
catcctggccaaaaataaaagcttcttaagctgggtgactctaagtttgtgtgtggtttacgcttggacatgcgttacttttatgacataaaagtgacttcaatctggtaagatatatttat

SEQ ID NO: 4831 - DNA, 122 bp, Homo sapiens
  misc_feature (61)..(62): /note="This region represents a CpG dinucleotide"
  misc_feature (61)..(61): /note="Nucleotide may be methylated to form 5-methylcytosine"
tgagagtcacccatcaccatccatctggtggaaacattacaggagcaagtggataaaagacgattttgctgtaagatcagaacggaaaaagacgagcccacaaagaaaatctagagggagga

SEQ ID NO: 4832 - DNA, 122 bp, Homo sapiens
  misc_feature (61)..(62): /note="This region represents a CpG dinucleotide"
  misc_feature (61)..(61): /note="Nucleotide may be methylated to form 5-methylcytosine"
tattgttggctgttgtgtgactgtcatcattgctgccaccaccatcaccatcatgagcatcgccatcaccaccatcatcaccatcaccaccatcaccatcatgaccatcgccatcaccacca

SEQ ID NO: 4833 - DNA, 122 bp, Homo sapiens
  misc_feature (61)..(62): /note="This region represents a CpG dinucleotide"
  misc_feature (61)..(61): /note="Nucleotide may be methylated to form 5-methylcytosine"
aaacactgaagccaaatttcatcttggaacactttgcataacaagcaatttaaggtaaggcggacccccgagagctacagaacgtttaaatgatgggcaaatatttctgtttggttgttagg

SEQ ID NO: 4834 - DNA, 122 bp, Homo sapiens
  misc_feature (61)..(62): /note="This region represents a CpG dinucleotide"
  misc_feature (61)..(61): /note="Nucleotide may be methylated to form 5-methylcytosine"
taagaacagtttttgtacagtcatgagtcacttaacaagggggataagatctgagaaatgcgatgtttggcaagttcactgttgtgtgaacatcaacgagcgtattcacaaacctagacagt

SEQ ID NO: 4835 - DNA, 122 bp, Homo sapiens
  misc_feature (61)..(62): /note="This region represents a CpG dinucleotide"
  misc_feature (61)..(61): /note="Nucleotide may be methylated to form 5-methylcytosine"
agagttcaactgtaaggaacataacagagctactaaagccaacgtcttccatccttgtgtcgggtctccaaacgtcccccaaaattatctttaaaaggccaaatttatgctattttttccaa

SEQ ID NO: 4836 - DNA, 122 bp, Homo sapiens
  misc_feature (61)..(62): /note="This region represents a CpG dinucleotide"
  misc_feature (61)..(61): /note="Nucleotide may be methylated to form 5-methylcytosine"
acgaaacttgggaaggaaaacatccaagaggcgtctgtttgacgtgggtaacgtggggaacgcatactgtctggcaagaattctactaggaccacgggaaacaaagcagattaaaacactct

SEQ ID NO: 4837 - DNA, 122 bp, Homo sapiens
  misc_feature (61)..(62): /note="This region represents a CpG dinucleotide"
  misc_feature (61)..(61): /note="Nucleotide may be methylated to form 5-methylcytosine"
gacttacctcatagagctttatagagatcaaagagataatgggtcaaaaattgttagtttcgtgctcgcatataataagggctcagtgaatggtagctattattagggatgtcaaaagggtt

SEQ ID NO: 4838 - DNA, 122 bp, Homo sapiens
  misc_feature (61)..(62): /note="This region represents a CpG dinucleotide"
  misc_feature (61)..(61): /note="Nucleotide may be methylated to form 5-methylcytosine"
ttaagaggaacaaaaaaaccttgaatgtgaaagtgctcattaaaacttttgccaggcgggcgtggtggctcacatctgtaatcctagcactttgggaggccgaggcgggcagctcacaaagt

SEQ ID NO: 4839 - DNA, 122 bp, Homo sapiens
  misc_feature (61)..(62): /note="This region represents a CpG dinucleotide"
  misc_feature (61)..(61): /note="Nucleotide may be methylated to form 5-methylcytosine"
tttgcactttttgcgtgtttgactccacggatgtgcatcaccacggcgctgcgctctgcacggaaaccttgaacttcctcaaaaaatgaagagatgtcctgttcgtacattcgcatttgggc

SEQ ID NO: 4840 - DNA, 122 bp, Homo sapiens
  misc_feature (61)..(62): /note="This region represents a CpG dinucleotide"
  misc_feature (61)..(61): /note="Nucleotide may be methylated to form 5-methylcytosine"
gttaggaaagacaagttctggcctacaaaggcacaaaaaggggagttatgatctggtttgcgatgctcagggaagaggcatttaacctcagcctgagtaatgaagaagtctaactccagggg

SEQ ID NO: 4841 - DNA, 122 bp, Homo sapiens
  misc_feature (61)..(62): /note="This region represents a CpG dinucleotide"
  misc_feature (61)..(61): /note="Nucleotide may be methylated to form 5-methylcytosine"
atgtagagtcttaaaagcttgttgggagagtttggattttattctaagagcaatgacaagcggctggaaggctttaaatagggaagaaaaataacctgacttatttcaaatcttctttggca

SEQ ID NO: 4842 - DNA, 122 bp, Homo sapiens
  misc_feature (61)..(62): /note="This region represents a CpG dinucleotide"
  misc_feature (61)..(61): /note="Nucleotide may be methylated to form 5-methylcytosine"
aacacccaacctctgatcaggtggctcttcttgttatgtttggggcctcttactcattcccgggcagtgttcctcggcaatatgcctgtgacaagcgtttgctgtatttgttgttcgactta

SEQ ID NO: 4843 - DNA, 122 bp, Homo sapiens
  misc_feature (61)..(62): /note="This region represents a CpG dinucleotide"
  misc_feature (61)..(61): /note="Nucleotide may be methylated to form 5-methylcytosine"
aactttatgttcattttttaagaagtcaagtatctcctcattttggcatttgatgagtaacgggagaaaacctgagaagagacagaagtaatgcaaaggtcaccgtatcttccagcataagt

SEQ ID NO: 4844 - DNA, 122 bp, Homo sapiens
  misc_feature (61)..(62): /note="This region represents a CpG dinucleotide"
  misc_feature (61)..(61): /note="Nucleotide may be methylated to form 5-methylcytosine"
atgatacactgttgactgataccaactgggtgtggtcgatcccaggtgcacccaaacctgcgggaatggcagaaatacagctgtgcttgggccatcacagctctgctagtatgggcctgctg

SEQ ID NO: 4845 - DNA, 122 bp, Homo sapiens
  misc_feature (61)..(62): /note="This region represents a CpG dinucleotide"
  misc_feature (61)..(61): /note="Nucleotide may be methylated to form 5-methylcytosine"
gtctctctaccatgccagactagagtcaagctcgacagggtcttcttttcccaatgactccgccaagcccattcccttggctgtagttttgctgaatcataggtaggaacagtgggaatctg

SEQ ID NO: 4846 - DNA, 122 bp, Homo sapiens
  misc_feature (61)..(62): /note="This region represents a CpG dinucleotide"
  misc_feature (61)..(61): /note="Nucleotide may be methylated to form 5-methylcytosine"
agatgactgccaggattccagatattatcacaacactttccccttggaatttattggctacgactgagtcatgtggccactcatagatgcaagggaggctgagtaagcaagtgtcagacata

SEQ ID NO: 4847 - DNA, 122 bp, Homo sapiens
  misc_feature (61)..(62): /note="This region represents a CpG dinucleotide"
  misc_feature (61)..(61): /note="Nucleotide may be methylated to form 5-methylcytosine"
ccatggcctgtccttggcttgtggggaggctgccacccacttacactggatagaaccccacggaggggttttaagagaaacagagtgccctgaaacacatgcctttattttgccagtaaaac

SEQ ID NO: 4848 - DNA, 122 bp, Homo sapiens
  misc_feature (61)..(62): /note="This region represents a CpG dinucleotide"
  misc_feature (61)..(61): /note="Nucleotide may be methylated to form 5-methylcytosine"
ctgtcatgacacctgtaggactcaatacatggaacgcagagtaggttcactgggcaacagcgggagacagaggtaagaggtaggctgaggccgtgtcgtcgggagctggtgtgggcgggtca

SEQ ID NO: 4849 - DNA, 122 bp, Homo sapiens
  misc_feature (61)..(62): /note="This region represents a CpG dinucleotide"
  misc_feature (61)..(61): /note="Nucleotide may be methylated to form 5-methylcytosine"
gtaaaatgagaacatttttggccctgtaaattcatagagaagttactaattggtgccatacgatagactgacttaggtagtgtgttttggtgtgtatctcagaatccaaatcagcggagcat

SEQ ID NO: 4850 - DNA, 122 bp, Homo sapiens
  misc_feature (61)..(62): /note="This region represents a CpG dinucleotide"
  misc_feature (61)..(61): /note="Nucleotide may be methylated to form 5-methylcytosine"
tcacacatcgtggtggtggctttctctgtgttcctctgttgattcagtctctggaattaacggatcaggattccatgcccagaatgctacaaagactgtgcttgagttctcccacatctcac

SEQ ID NO: 4851 - DNA, 122 bp, Homo sapiens
  misc_feature (61)..(62): /note="This region represents a CpG dinucleotide"
  misc_feature (61)..(61): /note="Nucleotide may be methylated to form 5-methylcytosine"
ttaatttcagcatagaaatctgaacaccatgacatttttattgttaccttttaaatgcttcggctgggtttctctcgcactccccaggctgtaagaggctttggactgctggatcccttagc

SEQ ID NO: 4852 - DNA, 122 bp, Homo sapiens
  misc_feature (61)..(62): /note="This region represents a CpG dinucleotide"
  misc_feature (61)..(61): /note="Nucleotide may be methylated to form 5-methylcytosine"
catcctggccctggtcacgtctcttgggccgcacctttatcatcctcatcgaagtcatcacggaagcatccatggagatgtttatcttgtgattgccgattgtttctaatctattaaaagtc

SEQ ID NO: 4853 - DNA, 122 bp, Homo sapiens
  misc_feature (61)..(62): /note="This region represents a CpG dinucleotide"
  misc_feature (61)..(61): /note="Nucleotide may be methylated to form 5-methylcytosine"
gagaaagcaaaagactaaccctttgagacatcctgaaactgatcactggtggtgaaatttcgtggcccaggccaacagtacggaaattgccccacggataagcattctgtggattctcagca

SEQ ID NO: 4854 - DNA, 122 bp, Homo sapiens
  misc_feature (61)..(62): /note="This region represents a CpG dinucleotide"
  misc_feature (61)..(61): /note="Nucleotide may be methylated to form 5-methylcytosine"
aattcaaattccagctctgtttccagctagctgtgtcatcctgagcaagcttcctaaccacgctgaatctctattttcctttcttcttacctggaggacatagtacctactgcagaaggttt

SEQ ID NO: 4855 - DNA, 122 bp, Homo sapiens
  misc_feature (61)..(62): /note="This region represents a CpG dinucleotide"
  misc_feature (61)..(61): /note="Nucleotide may be methylated to form 5-methylcytosine"
tgatcgctggccttcctgacttaacattcatgcatgccaaggtgttgatgttcccagccacgttaacaccttccacaagctctcaagaaaaagcagacggataactgatgtgaattggacag

SEQ ID NO: 4856 - DNA, 122 bp, Homo sapiens
  misc_feature (61)..(62): /note="This region represents a CpG dinucleotide"
  misc_feature (61)..(61): /note="Nucleotide may be methylated to form 5-methylcytosine"
acaaaggagcaaaaagtcccacaaagggaagttctcacgatgactcgaactccacagaagcgcagcattctcggtgatgctgtcagtacctgcctctgcaagtatgttcacaagatgtctgt

SEQ ID NO: 4857 - DNA, 122 bp, Homo sapiens
  misc_feature (61)..(62): /note="This region represents a CpG dinucleotide"
  misc_feature (61)..(61): /note="Nucleotide may be methylated to form 5-methylcytosine"
agcttactacaactacttagagtcttctgaaatttctcttttcttgtacagttcccttcgcgtttacaaataattgttattattgcctgcagttattgtctgcttgaacaaaaatacatgca

SEQ ID NO: 4858 - DNA, 122 bp, Homo sapiens
  misc_feature (61)..(62): /note="This region represents a CpG dinucleotide"
  misc_feature (61)..(61): /note="Nucleotide may be methylated to form 5-methylcytosine"
attcagtgtgtccgaggaacagcaaccagggcggcatggccggagcccagtgagtgagtacgtggtcctgatgagattggagagatggacaagggcctacacgatggggacagagttgctca

SEQ ID NO: 4859 - DNA, 122 bp, Homo sapiens
  misc_feature (61)..(62): /note="This region represents a CpG dinucleotide"
  misc_feature (61)..(61): /note="Nucleotide may be methylated to form 5-methylcytosine"
aaaataaagtttaaagaacacaagctgcttaggtgtctcaagtgcaaagaactactgacacggataatgttaacgactttcaactgcctctcatctaatagtatctgtgcaataaagtccaa

SEQ ID NO: 4860 - DNA, 122 bp, Homo sapiens
  misc_feature (61)..(62): /note="This region represents a CpG dinucleotide"
  misc_feature (61)..(61): /note="Nucleotide may be methylated to form 5-methylcytosine"
agagatgccattaggtgaaaatattcatgttaagctgatttttcctctttgagctccagacgagggaagcaattaatgaaccagcctaagcagagttgtctagcactgtgtgtgtctttttg

SEQ ID NO: 4861 - DNA, 122 bp, Homo sapiens
  misc_feature (61)..(62): /note="This region represents a CpG dinucleotide"
  misc_feature (61)..(61): /note="Nucleotide may be methylated to form 5-methylcytosine"
ctaacaatatatgtgagaactgagttatgacaagtgagtagacattttccagatgggttacgagacaaagggcattttaagcagagacaacagcataagcacaaggccttgcattatggcag

SEQ ID NO: 4862 - DNA, 122 bp, Homo sapiens
  misc_feature (61)..(62): /note="This region represents a CpG dinucleotide"
  misc_feature (61)..(61): /note="Nucleotide may be methylated to form 5-methylcytosine"
agtttgtatgcattcttgcgaggtacaggtgctgactcacttggctacaggtatggcaatcggcttgctctttcatctgggtgagatgcaaatcccatactagctggggaggagcagcttac

SEQ ID NO: 4863 - DNA, 122 bp, Homo sapiens
  misc_feature (61)..(62): /note="This region represents a CpG dinucleotide"
  misc_feature (61)..(61): /note="Nucleotide may be methylated to form 5-methylcytosine"
gaaccagtttgtaacaggcttgtctttcacggtcctgtctcagggttgctggcaggcttgcgagaagatctgacaagagtggcagcagaggcgtctcagtgaaagacggaaaggcaagaaac

SEQ ID NO: 4864 - DNA, 122 bp, Homo sapiens
  misc_feature (61)..(62): /note="This region represents a CpG dinucleotide"
  misc_feature (61)..(61): /note="Nucleotide may be methylated to form 5-methylcytosine"
tgggtggcttatggttcccgcagaggcattccaagttacacgatctgacaagacatggagcgacctgagtttgcgtgtttctaacacgttggcttgaatccagcatgtgctggtgctggctg

SEQ ID NO: 4865 - DNA, 122 bp, Homo sapiens
  misc_feature (61)..(62): /note="This region represents a CpG dinucleotide"
  misc_feature (61)..(61): /note="Nucleotide may be methylated to form 5-methylcytosine"
ctgcactgctattctggcagcactgtctgctcagtagtcctgagtgctgcacacataggacgtggcgctgctgaatggtaatccggaattcacaaaatgctgacggaggcagtaaactgata

SEQ ID NO: 4866 - DNA, 122 bp, Homo sapiens
  misc_feature (61)..(62): /note="This region represents a CpG dinucleotide"
  misc_feature (61)..(61): /note="Nucleotide may be methylated to form 5-methylcytosine"
agtaattgatgagctgtaaaactggttaggtcataccgcccagaagatactgactcttgccggtcacctttcagatacaaaccatttaaatttagtttaatcacactgaaactatttccaag

SEQ ID NO: 4867 - DNA, 122 bp, Homo sapiens
  misc_feature (61)..(62): /note="This region represents a CpG dinucleotide"
  misc_feature (61)..(61): /note="Nucleotide may be methylated to form 5-methylcytosine"
agcaggcctgaacatagtgactaccatgcattcatctacaatttgtatctctgattctaacgtgcttacaccttaaattagtattatttcttccatttcagcaagaaaaatccaagactact

SEQ ID NO: 4868 - DNA, 122 bp, Homo sapiens
  misc_feature (61)..(62): /note="This region represents a CpG dinucleotide"
  misc_feature (61)..(61): /note="Nucleotide may be methylated to form 5-methylcytosine"
cacaaaaactcactttcaattacatgcaaattaagaggtgagtcaatgcaaattgaggggcggattatttagaactttctaggaaagggacagtaacttccaggtcattgccttggaatggt

SEQ ID NO: 4869 - DNA, 122 bp, Homo sapiens
  misc_feature (61)..(62): /note="This region represents a CpG dinucleotide"
  misc_feature (61)..(61): /note="Nucleotide may be methylated to form 5-methylcytosine"
agtggcaacaaggccggataagttacatttgtctaaatccagcagctgttggtagtttaacgattgtggaatctccagaggcaagggttgcatttagtgtttgctgaaaccactgttaatta

SEQ ID NO: 4870 - DNA, 122 bp, Homo sapiens
  misc_feature (61)..(62): /note="This region represents a CpG dinucleotide"
  misc_feature (61)..(61): /note="Nucleotide may be methylated to form 5-methylcytosine"
tcccttcctccaggtttaattaattccaccctttctttccccagtccttgtagaaaacagcgaccacaactttgactggtcaagagagccaggataaaaggcgcttctaaattaagcagtgc

SEQ ID NO: 4871 - DNA, 122 bp, Homo sapiens
  misc_feature (61)..(62): /note="This region represents a CpG dinucleotide"
  misc_feature (61)..(61): /note="Nucleotide may be methylated to form 5-methylcytosine"
cacactttgtgagaaccaatgaataggagcctgagctgctggaatctatccctatgaattcgtggcataataggtatttaaaaaatacctctagactgtaaaaagcaaatagacaaacaaag

SEQ ID NO: 4872 - DNA, 122 bp, Homo sapiens
  misc_feature (61)..(62): /note="This region represents a CpG dinucleotide"
  misc_feature (61)..(61): /note="Nucleotide may be methylated to form 5-methylcytosine"
attatttgacattccagcgcaatgcgtcatgaacaagaggtgccattctctgagagagaacgagaaggctgaaaaatgttctggtgaaaaagacccacaggcgtcccaacctcagccacaag

SEQ ID NO: 4873 - DNA, 122 bp, Homo sapiens
  misc_feature (61)..(62): /note="This region represents a CpG dinucleotide"
  misc_feature (61)..(61): /note="Nucleotide may be methylated to form 5-methylcytosine"
cagttctgaagctctatggttgtaagcctcgccttggcttgactgcacggctttaaagtacgaatctgttcacaggttgtccatgattaaaagccacacctgggccgagcacagtggctcac

SEQ ID NO: 4874 - DNA, 122 bp, Homo sapiens
  misc_feature (61)..(62): /note="This region represents a CpG dinucleotide"
  misc_feature (61)..(61): /note="Nucleotide may be methylated to form 5-methylcytosine"
tggcaaaacatctcaaatgtagggcttatgacaaaatgaccagagatttgccctgtgactcgctccttattaaaaccaggaaatctccatcctatctggtgagacagctgtgcaggcaactt

SEQ ID NO: 4875 - DNA, 122 bp, Homo sapiens
  misc_feature (61)..(62): /note="This region represents a CpG dinucleotide"
  misc_feature (61)..(61): /note="Nucleotide may be methylated to form 5-methylcytosine"
gtgcagctggctaggttgtacactgcacaactccaggaggtgcattcacataaactacagcgtgaggagtgccctggcattactcaaggagcaacctacacaattgtacagtggagtactgt

SEQ ID NO: 4876 - DNA, 122 bp, Homo sapiens
  misc_feature (61)..(62): /note="This region represents a CpG dinucleotide"
  misc_feature (61)..(61): /note="Nucleotide may be methylated to form 5-methylcytosine"
tttatttgagttaaattggaaaaaacagtcgtgggctcttcagttggctctactatctgccgccagggctgctccgaaccactccacaagtcaaaacgcgctttcactctgtctcggcatac

SEQ ID NO: 4877 - DNA, 122 bp, Homo sapiens
  misc_feature (61)..(62): /note="This region represents a CpG dinucleotide"
  misc_feature (61)..(61): /note="Nucleotide may be methylated to form 5-methylcytosine"
gtatatgtcaacacatatgcccacgtgaatttcaaacaattaaacaagcgtaacacttgtcgtgcttattatgagccaggcatgttctaagtgcttcataagtatggtattaactcacttaa

SEQ ID NO: 4878 - DNA, 122 bp, Homo sapiens
  misc_feature (61)..(62): /note="This region represents a CpG dinucleotide"
  misc_feature (61)..(61): /note="Nucleotide may be methylated to form 5-methylcytosine"
ccttttctgaggacgctgtgcaggccaatgcgggtgggccagacagaacatgtctgaggacgggatgtggtccacggggtgccagtttgcaacctcctcatccagccaaactgtactttttg

SEQ ID NO: 4879 - DNA, 122 bp, Homo sapiens
  misc_feature (61)..(62): /note="This region represents a CpG dinucleotide"
  misc_feature (61)..(61): /note="Nucleotide may be methylated to form 5-methylcytosine"
atcagcggttccccattcctcggggttacaagatttgctttagtctgtaggaaaagtaagcgcagtcagttagctgttctcggatgcatgatgcagcccaaagcctgaatcacaaggttttt

SEQ ID NO: 4880 - DNA, 122 bp, Homo sapiens
  misc_feature (61)..(62): /note="This region represents a CpG dinucleotide"
  misc_feature (61)..(61): /note="Nucleotide may be methylated to form 5-methylcytosine"
gtgaagcactgcaggcatcaaaagtgactgcaattcatggttgctggattctgagttctgcgcacatttctaagtcagcatcaactgactagaatcacaatttctgaagaagcaaaaagctg

SEQ ID NO: 4881 - DNA, 122 bp, Homo sapiens
  misc_feature (61)..(62): /note="This region represents a CpG dinucleotide"
  misc_feature (61)..(61): /note="Nucleotide may be methylated to form 5-methylcytosine"
ggaactgtgtcataatatctgttagaggcgtgcaaactcggccacaaggtcatggtcatacgttattgttggtcaaaagccgcagccctacctgaggctttgagagatatgaacaccaatga

SEQ ID NO: 4882 - DNA, 122 bp, Homo sapiens
  misc_feature (61)..(62): /note="This region represents a CpG dinucleotide"
  misc_feature (61)..(61): /note="Nucleotide may be methylated to form 5-methylcytosine"
cagctccatcaagcgtctcgccaacctctcccttggggctcagtcaagggaatgaaaaaacgaggctagacacctgtccccaacggaaaaaccaagaacacacctggagagcagctcagaca

SEQ ID NO: 4883 - DNA, 122 bp, Homo sapiens
  misc_feature (61)..(62): /note="This region represents a CpG dinucleotide"
  misc_feature (61)..(61): /note="Nucleotide may be methylated to form 5-methylcytosine"
ctggttttatagtttcctaagttattgccacaggtcatggatctgtggcgctcaaatgttcgctcacaaggttcacagcacattctttgcagttgcaccacccagctaggaggggcgaaacc

SEQ ID NO: 4884 - DNA, 122 bp, Homo sapiens
  misc_feature (61)..(62): /note="This region represents a CpG dinucleotide"
  misc_feature (61)..(61): /note="Nucleotide may be methylated to form 5-methylcytosine"
ctaaaacgatccgcctgcctgggccttccaaagtgctaggattatatgcgtgaaccaccgcgcctgaccatggaatcagtttttcaatctgtgctcgaggtgttgtgttcttaactatcttc

SEQ ID NO: 4885 - DNA, 122 bp, Homo sapiens
  misc_feature (61)..(62): /note="This region represents a CpG dinucleotide"
  misc_feature (61)..(61): /note="Nucleotide may be methylated to form 5-methylcytosine"
ctcttgcttttgatttggtgttactggattcctttgagtcactaacatctttatgttgatcgcataacaggcagattagtaccactataacttcatgagtaacaacctcaaatgggtacttt

SEQ ID NO: 4886 - DNA, 122 bp, Homo sapiens
  misc_feature (61)..(62): /note="This region represents a CpG dinucleotide"
  misc_feature (61)..(61): /note="Nucleotide may be methylated to form 5-methylcytosine"
tttacctcaaaagtgcatgaaatggaaatggaaatatcttgtgaagatgtagacaaatgacggtcattgcccagagcagtagttactgtcagaaaaagagataaggatttccagtctgacag

SEQ ID NO: 4887 - DNA, 122 bp, Homo sapiens
  misc_feature (61)..(62): /note="This region represents a CpG dinucleotide"
  misc_feature (61)..(61): /note="Nucleotide may be methylated to form 5-methylcytosine"
caaactcctcccaatttgcctggaatttttcccagttttagcattgaaagtcccacctcccgggaaatccctcaatccctcaatccctggctaactgggatagtcaatcactgtatcctcaa

SEQ ID NO: 4888 - DNA, 122 bp, Homo sapiens
  misc_feature (61)..(62): /note="This region represents a CpG dinucleotide"
  misc_feature (61)..(61): /note="Nucleotide may be methylated to form 5-methylcytosine"
tgctatggtactcagttacgtaattaaacagtaatctaggtgttgccgggaaggctatttcgcagatgtggttgacatctatcataagttggcttcaagtaaaggagattaccctcaaaatt

SEQ ID NO: 4889 - DNA, 122 bp, Homo sapiens
  misc_feature (61)..(62): /note="This region represents a CpG dinucleotide"
  misc_feature (61)..(61): /note="Nucleotide may be methylated to form 5-methylcytosine"
tttctggaactgcagccagcgacttattagtactggttgcatactttctggaatagcaagcgaataagagcacaatacagcagagtttcttggcagggagttgcattttcttaactgcttta

SEQ ID NO: 4890 - DNA, 122 bp, Homo sapiens
  misc_feature (61)..(62): /note="This region represents a CpG dinucleotide"
  misc_feature (61)..(61): /note="Nucleotide may be methylated to form 5-methylcytosine"
ttgttctttgaatcagactgtcagccgttgctgacattcttggtgactgctttgtgtacccgcctctcagttctgtctgtaattccgcttactgattcttatctgtgttgagtttagaagcc

SEQ ID NO: 4891 - DNA, 122 bp, Homo sapiens
  misc_feature (61)..(62): /note="This region represents a CpG dinucleotide"
  misc_feature (61)..(61): /note="Nucleotide may be methylated to form 5-methylcytosine"
ccctctcagagacaaagagtggcagaagcaatctaggagctggagtcatatgaggaaatgcgtatcacttgctcacagactgctgtgagtaaagttcaggatgggtcacctggaagtaggaa

SEQ ID NO: 4892 - DNA, 122 bp, Homo sapiens
  misc_feature (61)..(62): /note="This region represents a CpG dinucleotide"
  misc_feature (61)..(61): /note="Nucleotide may be methylated to form 5-methylcytosine"
aaaagtgtcaaatgccttgatgtctcccacagatcctagccaagagtcatactacaaattcgcaaaggaagattaagtttttcagataacaattaaagtaacaattaatccattgagataat

SEQ ID NO: 4893 - DNA, 122 bp, Homo sapiens
  misc_feature (61)..(62): /note="This region represents a CpG dinucleotide"
  misc_feature (61)..(61): /note="Nucleotide may be methylated to form 5-methylcytosine"
gcagaagttgctctggagcacacccatggtgccagctgcactcagaaggcctggtgacagcgcttacatttaatctttagtctagagctttcttccagtgaaagttaaggggtggaaacaag

SEQ ID NO: 4894 - DNA, 122 bp, Homo sapiens
  misc_feature (61)..(62): /note="This region represents a CpG dinucleotide"
  misc_feature (61)..(61): /note="Nucleotide may be methylated to form 5-methylcytosine"
gggagaggcgggcctgtgtggcggggatcgtgctgtaatggagcaggggcggcggggacccggaggtgagggctgcgagggccgcccgggagggtccgggctgggaaaagggcctccgccgg

SEQ ID NO: 4895 - DNA, 122 bp, Homo sapiens
  misc_feature (61)..(62): /note="This region represents a CpG dinucleotide"
  misc_feature (61)..(61): /note="Nucleotide may be methylated to form 5-methylcytosine"
cctctagcatctacagggcttggcatacacgtgaaatgcatgttgagtgatgaacgggagcgcacaggactcttaagaaccgagaccgtccccacagccaacgtatgaagaaatcccatgtt

SEQ ID NO: 4896 - DNA, 122 bp, Homo sapiens
  misc_feature (61)..(62): /note="This region represents a CpG dinucleotide"
  misc_feature (61)..(61): /note="Nucleotide may be methylated to form 5-methylcytosine"
catttctaagtaccagttaacttacaaggctaagtattaacaggtttcacccttgcttgccggcaaagaaatctgtttctaactattccttttacctgttcaaacataaatgcaaactccac

SEQ ID NO: 4897 - DNA, 122 bp, Homo sapiens
  misc_feature (61)..(62): /note="This region represents a CpG dinucleotide"
  misc_feature (61)..(61): /note="Nucleotide may be methylated to form 5-methylcytosine"
acccctgtgtgagtaccgactgcccaagagctggcagtagttttgtactctgagcctgagcgtgtggccccacgttccatgaggcctttggccggtttgtttgccagagtgtctctgagagg

SEQ ID NO: 4898 - DNA, 122 bp, Homo sapiens
  misc_feature (61)..(62): /note="This region represents a CpG dinucleotide"
  misc_feature (61)..(61): /note="Nucleotide may be methylated to form 5-methylcytosine"
tgtactgtagagccaaatggtgaacagccataaaaatagtacttgctggtgaaaacgacacgtgtgcaaaccaggtggctccagaacatgaccaaagactagtcactgccagccggagctat

SEQ ID NO: 4899 - DNA, 122 bp, Homo sapiens
  misc_feature (61)..(62): /note="This region represents a CpG dinucleotide"
  misc_feature (61)..(61): /note="Nucleotide may be methylated to form 5-methylcytosine"
atttctctgaaatgacactacatgaatgcctcaatgaatgcctcaagggggtcacacaaccggttctgagacttggtgaccattgtttgtgtctgtgttcaatttatttcaaaattaatatt

SEQ ID NO: 4900 - DNA, 122 bp, Homo sapiens
  misc_feature (61)..(62): /note="This region represents a CpG dinucleotide"
  misc_feature (61)..(61): /note="Nucleotide may be methylated to form 5-methylcytosine"
tgccaatttccagatggaactctgcagctatactgagttcactccttttcaaaatctgttcggcaagtgctcccagggctggtataagctctggggctcgtttgtttttcctggtaaccatg

SEQ ID NO: 4901 - DNA, 122 bp, Homo sapiens
  misc_feature (61)..(62): /note="This region represents a CpG dinucleotide"
  misc_feature (61)..(61): /note="Nucleotide may be methylated to form 5-methylcytosine"
cattcactctgggggaagccagctcttatgtcatggggacactcaagcagccctatgagccgtcttggaagaaaatgttccagctgagtcaagccttcaggtaactgcagcctcagctgtta

SEQ ID NO: 4902 - DNA, 122 bp, Homo sapiens
  misc_feature (61)..(62): /note="This region represents a CpG dinucleotide"
  misc_feature (61)..(61): /note="Nucleotide may be methylated to form 5-methylcytosine"
gctgaaaaaaagcagctgtccgagttgccaggtcagggtaaaactgaagaattagttagccgggacttggagcagataaaaacccagctcctatctcaagaatgggaaattaaccctagtaa

SEQ ID NO: 4903 - DNA, 122 bp, Homo sapiens
  misc_feature (61)..(62): /note="This region represents a CpG dinucleotide"
  misc_feature (61)..(61): /note="Nucleotide may be methylated to form 5-methylcytosine"
gcttacccgcatttcatgtccatcctgcaccactgcctccaaatgccttgtaagtgtgttcgtgactcacatgtgtgcttctgaatgtttggacattgtcctaatgggttctggctcctgca

SEQ ID NO: 4904 - DNA, 122 bp, Homo sapiens
  misc_feature (61)..(62): /note="This region represents a CpG dinucleotide"
  misc_feature (61)..(61): /note="Nucleotide may be methylated to form 5-methylcytosine"
tctgtaacctgaatttggccagcctggttcatttgcaaaaaacaggccacaacttgttagcgcagaaatgcagctgagtgggccttaatcacaggtttcacttttcaaattgagtactgaaa

SEQ ID NO: 4905 - DNA, 122 bp, Homo sapiens
  misc_feature (61)..(62): /note="This region represents a CpG dinucleotide"
  misc_feature (61)..(61): /note="Nucleotide may be methylated to form 5-methylcytosine"
atttaagttttaaagatgtgagatgttacgtgaaatctccacattttatctctcactagccgtttgacagatagtggagtgtttaccattgccaggcattatactagacactcactgttact

SEQ ID NO: 4906 - DNA, 122 bp, Homo sapiens
  misc_feature (61)..(62): /note="This region represents a CpG dinucleotide"
  misc_feature (61)..(61): /note="Nucleotide may be methylated to form 5-methylcytosine"
caggtggctctcttaacctctctagacctcagtttccccatctgtaaaattgggaagagccggtgggcagggatgtgtgcacagcccctggcatgaaggccctgctcctgtccctgctccga

SEQ ID NO: 4907 - DNA, 122 bp, Homo sapiens
  misc_feature (61)..(62): /note="This region represents a CpG dinucleotide"
  misc_feature (61)..(61): /note="Nucleotide may be methylated to form 5-methylcytosine"
ggcgatgcactgtaagagcattcacaaagcggcaagcattatctcagattcaagctatgccgttttctctcctatttttaaataccaaatagagaaatgggagagtcctttctttgtgacag

SEQ ID NO: 4908 - DNA, 122 bp, Homo sapiens
  misc_feature (61)..(62): /note="This region represents a CpG dinucleotide"
  misc_feature (61)..(61): /note="Nucleotide may be methylated to form 5-methylcytosine"
ctttgttgaaggcttccttcataacaccgggatgaattgatggttcttctttgctctcagcgtacattgtccacaccttcatgctgggagtggattagtcattttgcaaggaacatttttta

SEQ ID NO: 4909 - DNA, 122 bp, Homo sapiens
  misc_feature (61)..(62): /note="This region represents a CpG dinucleotide"
  misc_feature (61)..(61): /note="Nucleotide may be methylated to form 5-methylcytosine"
gtcgataacattggtctgtaatctctctctcttttggtttgtgtgtttcctgtctttctccgacttctgtaatggtttacgcagaagggatgctgtagcttacagagacttggtggtgctcg

SEQ ID NO: 4910 - DNA, 122 bp, Homo sapiens
  misc_feature (61)..(62): /note="This region represents a CpG dinucleotide"
  misc_feature (61)..(61): /note="Nucleotide may be methylated to form 5-methylcytosine"
accatcaaagtgctgttgccacggaagcagcggtacagtagtctgcgcttgcctattgagcgtcctttgcccgtcacagttacccttttcagtagccctcgttggaattttccttctggtgg

SEQ ID NO: 4911 - DNA, 122 bp, Homo sapiens
  misc_feature (61)..(62): /note="This region represents a CpG dinucleotide"
  misc_feature (61)..(61): /note="Nucleotide may be methylated to form 5-methylcytosine"
actgggtttagagaggctaaataattgacccatgattaatactggtgatgatgatgtttacgactgaatacttattgtatgcccagccctgtactgagtcctttatatacatgatctccatt

SEQ ID NO: 4912 - DNA, 122 bp, Homo sapiens
  misc_feature (61)..(62): /note="This region represents a CpG dinucleotide"
  misc_feature (61)..(61): /note="Nucleotide may be methylated to form 5-methylcytosine"
tgtcatatcccaggtgctgaagagagaatagggatccggcgagatgagggaggagacatacgttaggaagcacaaatgcctagaagagtcatgctaataaggcacctgtagtgagcattttc

SEQ ID NO: 4913 - DNA, 122 bp, Homo sapiens
  misc_feature (61)..(62): /note="This region represents a CpG dinucleotide"
  misc_feature (61)..(61): /note="Nucleotide may be methylated to form 5-methylcytosine"
aacaaatactacctactttgctgatttctatgactcaaatatcctttcattagcaaaatgcggaattacagaatggaagcagcttgcattttgttttgatatggacttattcatcaaatatt

SEQ ID NO: 4914 - DNA, 122 bp, Homo sapiens
  misc_feature (61)..(62): /note="This region represents a CpG dinucleotide"
  misc_feature (61)..(61): /note="Nucleotide may be methylated to form 5-methylcytosine"
ggatggaatcaaaatctctcaggggcttgggctgcaggactttgacctaatcagagtcatcgggcgcgggagctacgccaaggttctcctggtgcggttgaagaagaatgaccaaatttacg

SEQ ID NO: 4915 - DNA, 122 bp, Homo sapiens
  misc_feature (61)..(62): /note="This region represents a CpG dinucleotide"
  misc_feature (61)..(61): /note="Nucleotide may be methylated to form 5-methylcytosine"
gaatgtgaaattgctttgtaaacataacgggccacacctgatatatatttacatttttcccgctactcacagccagtcacagtcgtctcactatgttctaatgccatcctagccatggtgca

SEQ ID NO: 4916 - DNA, 122 bp, Homo sapiens
  misc_feature (61)..(62): /note="This region represents a CpG dinucleotide"
  misc_feature (61)..(61): /note="Nucleotide may be methylated to form 5-methylcytosine"
tccttctcttgcttttcataaatactacaacttggaaatctctgcaagtcaatttttgaacgtgggtagaacctgtgaatacgatgatacattactcctatgaacacgttacaaagggagat

SEQ ID NO: 4917 - DNA, 122 bp, Homo sapiens
  misc_feature (61)..(62): /note="This region represents a CpG dinucleotide"
  misc_feature (61)..(61): /note="Nucleotide may be methylated to form 5-methylcytosine"
cacgtgtttttcaggttgtccgggtgccaaaaagcatgagtttctgaccagcgttctggacgcgctgtccacggacatggtccacgccgcctccgacccctcctcctcgtcaggcaggtacg

SEQ ID NO: 4918 - DNA, 122 bp, Homo sapiens
  misc_feature (61)..(62): /note="This region represents a CpG dinucleotide"
  misc_feature (61)..(61): /note="Nucleotide may be methylated to form 5-methylcytosine"
aaattgctgaaattcacacttcagctgtaataggaaatatcctctccattgggcaaaagccgaggaaatgactgtaactttccttcatcctcgtcatttacatagggcataccccaagtaga

SEQ ID NO: 4919 - DNA, 122 bp, Homo sapiens
  misc_feature (61)..(62): /note="This region represents a CpG dinucleotide"
  misc_feature (61)..(61): /note="Nucleotide may be methylated to form 5-methylcytosine"
caaggatttagcagaacaaacgggatcttaggacccctgccaggctgaaatcttccccaccgcagggtaccacgcttgtaccgagcccacctccttggagtaccccctgggtacgtttcgct

SEQ ID NO: 4920 - DNA, 122 bp, Homo sapiens
  misc_feature (61)..(62): /note="This region represents a CpG dinucleotide"
  misc_feature (61)..(61): /note="Nucleotide may be methylated to form 5-methylcytosine"
tgcctcatgccaagtcccatggaggcagttggctaagtgggcttccggcttctatctcaacgcaagctcgtcttctaaagcctctctggatttcctgtggtaatccttctttgtgtacctct

SEQ ID NO: 4921 - DNA, 122 bp, Homo sapiens
  misc_feature (61)..(62): /note="This region represents a CpG dinucleotide"
  misc_feature (61)..(61): /note="Nucleotide may be methylated to form 5-methylcytosine"
cttctggggcttgagtcataatgaaaagctcactgtcttctttgccgctcttggtggcctcgtggcttctctaattccctggccttagcatggaagcctctttatcattctgctctgtatga

SEQ ID NO: 4922 - DNA, 122 bp, Homo sapiens
  misc_feature (61)..(62): /note="This region represents a CpG dinucleotide"
  misc_feature (61)..(61): /note="Nucleotide may be methylated to form 5-methylcytosine"
tcagtggcattaagaacactcacattgttgtgcaggcatcaccactatccatctctgggacgctttctcatcttcccaaacagaaactctacacccttgaaacactaactccccagccccag

SEQ ID NO: 4923 - DNA, 122 bp, Homo sapiens
  misc_feature (61)..(62): /note="This region represents a CpG dinucleotide"
  misc_feature (61)..(61): /note="Nucleotide may be methylated to form 5-methylcytosine"
gcttgcatttgaatgaggatgttaaaacaattaagcaccgggctctatcattctgccatccgcttctcctgcgtggctaaaacactgaacatcttgagctgcatggtgcctggagctgtgcc

SEQ ID NO: 4924 - DNA, 122 bp, Homo sapiens
  misc_feature (61)..(62): /note="This region represents a CpG dinucleotide"
  misc_feature (61)..(61): /note="Nucleotide may be methylated to form 5-methylcytosine"
ttctcctggttcccctagttcttcctggtaaatggcagaaattgtatctgacgcaatgtgcgcaactttgtcctttgctggattcaggtttctggtcatgggtcagatcactcagtgcctga

SEQ ID NO: 4925 - DNA, 122 bp, Homo sapiens
  misc_feature (61)..(62): /note="This region represents a CpG dinucleotide"
  misc_feature (61)..(61): /note="Nucleotide may be methylated to form 5-methylcytosine"
gtcatttcttccaaaatacttggggtagaaggagggtgaaaaagagtgtgtgcatgcacgcgtatgtgtgtgtgtgcatatgtgttgaacagaagcatccagggataggaccaaagcttatt

SEQ ID NO: 4926 - DNA, 122 bp, Homo sapiens
  misc_feature (61)..(62): /note="This region represents a CpG dinucleotide"
  misc_feature (61)..(61): /note="Nucleotide may be methylated to form 5-methylcytosine"
taattcgaccctgttctgtggctgtctatatcccaccatcaggacagtcttctgatgatacgtcatttctttttttctttctttctttctttttttttgagatggagtttcattcttgttgc

SEQ ID NO: 4927 - DNA, 122 bp, Homo sapiens
  misc_feature (61)..(62): /note="This region represents a CpG dinucleotide"
  misc_feature (61)..(61): /note="Nucleotide may be methylated to form 5-methylcytosine"
gttgagttcttagtcttgagatctgttggctccacttggccctggttcaggaggaacatgcgtggaacccttgttctccccgaggcctgctcccagaccctatgatggctccatagtatcca

SEQ ID NO: 4928 - DNA, 122 bp, Homo sapiens
  misc_feature (61)..(62): /note="This region represents a CpG dinucleotide"
  misc_feature (61)..(61): /note="Nucleotide may be methylated to form 5-methylcytosine"
caaaagaatatgggaactactgtttcatttcccagttcttaagcagttgttctaatctgccgttctagttctgacacttgtttggctatgctttttaggtaatgttttttaggtaagactta

SEQ ID NO: 4929 - DNA, 122 bp, Homo sapiens
  misc_feature (61)..(62): /note="This region represents a CpG dinucleotide"
  misc_feature (61)..(61): /note="Nucleotide may be methylated to form 5-methylcytosine"
acagacctgaaggaacttgtttactccttcacaatgtaagcacacagaaggcactatgtacgaggaacaggccctctgcagacatcgaatctgctggcactttgctcttgatgtagacttcc

SEQ ID NO: 4930 - DNA, 122 bp, Homo sapiens
  misc_feature (61)..(62): /note="This region represents a CpG dinucleotide"
  misc_feature (61)..(61): /note="Nucleotide may be methylated to form 5-methylcytosine"
gtgaaaaagcaaaatgagtgttttactctcagattaaatttaaaatacaagaagtctgatcgataaggctttagtgcattacagtttctgctctgaaaagctgtgagtatcatagtctgcac

SEQ ID NO: 4931 - DNA, 122 bp, Homo sapiens
  misc_feature (61)..(62): /note="This region represents a CpG dinucleotide"
  misc_feature (61)..(61): /note="Nucleotide may be methylated to form 5-methylcytosine"
tacaatttggggttctgaaaatatgattgccaaatttacagcctcatttcaaagcaagcacgctcccctctcaccctcaaacatagacgcagcaacatcagccacaccaccagagcagcaat

SEQ ID NO: 4932 - DNA, 122 bp, Homo sapiens
  misc_feature (61)..(62): /note="This region represents a CpG dinucleotide"
  misc_feature (61)..(61): /note="Nucleotide may be methylated to form 5-methylcytosine"
acctgctaatacctcaaacccttgttataagctcgataaacttgtgctatgtgctggtaacgagcagctaacgattgctcaggtgtttatattaaacagattaatcgaggacacagtcgatg

SEQ ID NO: 4933 - DNA, 122 bp, Homo sapiens
  misc_feature (61)..(62): /note="This region represents a CpG dinucleotide"
  misc_feature (61)..(61): /note="Nucleotide may be methylated to form 5-methylcytosine"
atcgcagggtgggtctcagttctccattttgttaatatccaagttgatatttcccttttgcgacagtaacaacaacatgcaaaccaaaaactgaaacagcttcagttctgtgccctcaggat

SEQ ID NO: 4934 - DNA, 122 bp, Homo sapiens
  misc_feature (61)..(62): /note="This region represents a CpG dinucleotide"
  misc_feature (61)..(61): /note="Nucleotide may be methylated to form 5-methylcytosine"
tcactgtcacctggccccaacagaagggcaaatacgatcaaagcaatatacaaaacgagccgattgtgatctcttttttaaggaagagaaaactctgtctctgttctatttccttgtgtgtt

SEQ ID NO: 4935 - DNA, 122 bp, Homo sapiens
  misc_feature (61)..(62): /note="This region represents a CpG dinucleotide"
  misc_feature (61)..(61): /note="Nucleotide may be methylated to form 5-methylcytosine"
tttgtcctaacctgccttgtgttaatcattcatttaatgaatattcactgagaccgattacgtatctggtgttctacaaggcactgcgcatattcagaggcatattcatctttgtcacagct

SEQ ID NO: 4936 - DNA, 122 bp, Homo sapiens
  misc_feature (61)..(62): /note="This region represents a CpG dinucleotide"
  misc_feature (61)..(61): /note="Nucleotide may be methylated to form 5-methylcytosine"
cggtattagttgatgtcttccaatacatctcaggagaaggtcgagcttttcctactgaaccgagtgacatttaaaagggggcatttggatggaacatggtagaaagtagcaaactgctttag

SEQ ID NO: 4937 - DNA, 122 bp, Homo sapiens
  misc_feature (61)..(62): /note="This region represents a CpG dinucleotide"
  misc_feature (61)..(61): /note="Nucleotide may be methylated to form 5-methylcytosine"
tcaccacagtcacttttagagctttttcatcacctcacaaggaaaccctgtaattattaccgtctcccttccgagccacccagccctacgtagctaataatctacttgctgtctatatactt

SEQ ID NO: 4938 - DNA, 122 bp, Homo sapiens
  misc_feature (61)..(62): /note="This region represents a CpG dinucleotide"
  misc_feature (61)..(61): /note="Nucleotide may be methylated to form 5-methylcytosine"
caggtttcagaaatgtttgctgcatgcgctcattgtctgaatcattgtttcaggttgctccggttgctaagaagactatgaacaagtcagagaacctgctgtttgctggttcatcattagca

SEQ ID NO: 4939 - DNA, 122 bp, Homo sapiens
  misc_feature (61)..(62): /note="This region represents a CpG dinucleotide"
  misc_feature (61)..(61): /note="Nucleotide may be methylated to form 5-methylcytosine"
caccagggactcctggcactcagctgaaacggaatttggggaggacaaagtctgaatcaacgtgcatcatccatcagtgagccagcagccagcagggagggtgaccttcccagggcacagca

SEQ ID NO: 4940 - DNA, 122 bp, Homo sapiens
  misc_feature (61)..(62): /note="This region represents a CpG dinucleotide"
  misc_feature (61)..(61): /note="Nucleotide may be methylated to form 5-methylcytosine"
tctcgccactcagcaccctgcagtcttaattcacaaggcccgagttcccttggagggacgcgcgcgcgtcgagccctcatccccacgcggcggtgcaagcgcatgaatggacactggaaggc

SEQ ID NO: 4941 - DNA, 122 bp, Homo sapiens
  misc_feature (61)..(62): /note="This region represents a CpG dinucleotide"
  misc_feature (61)..(61): /note="Nucleotide may be methylated to form 5-methylcytosine"
atagttcattctctgtgcaccatctctctacttttccatactgtgaggtgttgagggcggcgtctgaattttgctaatctgtagattcccaagacccaatgccagctcctaaaggtgtgcca

SEQ ID NO: 4942 - DNA, 122 bp, Homo sapiens
  misc_feature (61)..(62): /note="This region represents a CpG dinucleotide"
  misc_feature (61)..(61): /note="Nucleotide may be methylated to form 5-methylcytosine"
agttttctgtatccatagagctgactttgctcaggaaatttacaacttacctaatttgaacgcagctggccaagtctgtatttccctccaggaatgtgcacagttgtgttcagaccgtttag

SEQ ID NO: 4943 - DNA, 122 bp, Homo sapiens
  misc_feature (61)..(62): /note="This region represents a CpG dinucleotide"
  misc_feature (61)..(61): /note="Nucleotide may be methylated to form 5-methylcytosine"
tcatgcctttgattcactgtcaaaggcttcattcatttattcacacgtcaggcagtccatcggtcaatcatttgagaatgtgcaagatgttttttggaggtacccagatgatttatactgct

SEQ ID NO: 4944 - DNA, 122 bp, Homo sapiens
  misc_feature (61)..(62): /note="This region represents a CpG dinucleotide"
  misc_feature (61)..(61): /note="Nucleotide may be methylated to form 5-methylcytosine"
aggttgcagtgagccgagatcaggccattgtactccagccttggcaacagaggtggactccgtctaaaaattaaaaattaaaaataaacaaataaaataaaataaagggaattatacggccc

SEQ ID NO: 4945 - DNA, 122 bp, Homo sapiens
  misc_feature (61)..(62): /note="This region represents a CpG dinucleotide"
  misc_feature (61)..(61): /note="Nucleotide may be methylated to form 5-methylcytosine"
tgacctcaagtagcagatctccttgtttgtttcccattgaaatcacctgtttaaactggacgctctccatcaatcaagtcccatctggagatagcagtgaatgtgctggttttcactgctta

SEQ ID NO: 4946 - DNA, 122 bp, Homo sapiens
  misc_feature (61)..(62): /note="This region represents a CpG dinucleotide"
  misc_feature (61)..(61): /note="Nucleotide may be methylated to form 5-methylcytosine"
gatgtaagagaatgagaatgccgtggaagatttgcttttaagcatataaaaccctgcctacgccataagaccaaaaaaagatattttgtctgtcttaacagagtccaaactaatcatccaaa

SEQ ID NO: 4947 - DNA, 122 bp, Homo sapiens
  misc_feature (61)..(62): /note="This region represents a CpG dinucleotide"
  misc_feature (61)..(61): /note="Nucleotide may be methylated to form 5-methylcytosine"
tcctattatttattcacctccccgccctcccctcccccgcctccactcctccttagcaggcgacatgctcagatgggccctgagccttggcccgggtctgggtccacccccattccctccct

SEQ ID NO: 4948 - DNA, 122 bp, Homo sapiens
  misc_feature (61)..(62): /note="This region represents a CpG dinucleotide"
  misc_feature (61)..(61): /note="Nucleotide may be methylated to form 5-methylcytosine"
gacacagccctgtcttcaaaacatttcagatatgcttgctgagatggcatttcatgctgccgtaagtgtgtattcttgtcacccagtgtccctcccagtcagggagggatcccatgcaaagt

SEQ ID NO: 4949 - DNA, 122 bp, Homo sapiens
  misc_feature (61)..(62): /note="This region represents a CpG dinucleotide"
  misc_feature (61)..(61): /note="Nucleotide may be methylated to form 5-methylcytosine"
tctcactctttttccccacctctcttgagcacgggcaagtttctggcaaaagtgtgtcttcgtacatttggaattttgtatgacctcatcaataggcactgtgacccactgtttagttttga

SEQ ID NO: 4950 - DNA, 122 bp, Homo sapiens
  misc_feature (61)..(62): /note="This region represents a CpG dinucleotide"
  misc_feature (61)..(61): /note="Nucleotide may be methylated to form 5-methylcytosine"
gtggtggctgtgggccttggccaggaatgggagggccagacacacgctaagacagtgaagcgccaaggccaggcttgcccctggcggaattctcataggcttcttgctttcatagagctaag

SEQ ID NO: 4951 - DNA, 122 bp, Homo sapiens
  misc_feature (61)..(62): /note="This region represents a CpG dinucleotide"
  misc_feature (61)..(61): /note="Nucleotide may be methylated to form 5-methylcytosine"
ctgttaaaacagtaataactttttttcctccacggcactttacaatgtatgacaatctttcgcagtctttatttcattttatttttatagcatgatctcacagagaagatattatcaatatc

SEQ ID NO: 4952 - DNA, 122 bp, Homo sapiens
  misc_feature (61)..(62): /note="This region represents a CpG dinucleotide"
  misc_feature (61)..(61): /note="Nucleotide may be methylated to form 5-methylcytosine"
tacccctttacccttaaacagctcattgcccctttacagggaagggctaagtacagtgtacggttttatcacattccagtgtaagaaatgcatcgtgaaaagcagatggagaggtaatgctg

SEQ ID NO: 4953 - DNA, 122 bp, Homo sapiens
  misc_feature (61)..(62): /note="This region represents a CpG dinucleotide"
  misc_feature (61)..(61): /note="Nucleotide may be methylated to form 5-methylcytosine"
atttgattaatatttaagctaattgtatttctagaacatatgactcagatcaatggtgagcggtggtaaaaagcttatattagaaaagtactaaagtctaatgtttgctgacttcactgttt

SEQ ID NO: 4954 - DNA, 122 bp, Homo sapiens
  misc_feature (61)..(62): /note="This region represents a CpG dinucleotide"
  misc_feature (61)..(61): /note="Nucleotide may be methylated to form 5-methylcytosine"
aaattcggataacgttaattgtgccactgtggtggcagtgcaagaaattcctgttcatcccgctgcaatgatgattaaggtaacaaacacccagtcgggaagtcaggctccggccctggaga

SEQ ID NO: 4955 - DNA, 122 bp, Homo sapiens
  misc_feature (61)..(62): /note="This region represents a CpG dinucleotide"
  misc_feature (61)..(61): /note="Nucleotide may be methylated to form 5-methylcytosine"
ctggtcttgtggaaatgactcctggggagcctgagagcctatagcctatgatttgtcagtcgcatgcagactggaggattggaacacaggagcctcaaagatgaagagttttttttccaccg

SEQ ID NO: 4956 - DNA, 122 bp, Homo sapiens
  misc_feature (61)..(62): /note="This region represents a CpG dinucleotide"
  misc_feature (61)..(61): /note="Nucleotide may be methylated to form 5-methylcytosine"
tcatccagacaggtccgcagtaataacaaccaaagacacatattctcaggcaatgataaccgcaccacgactccatggagacaccagtgttttaagatattgtcaattccagatatgtgtaa

SEQ ID NO: 4957 - DNA, 122 bp, Homo sapiens
  misc_feature (61)..(62): /note="This region represents a CpG dinucleotide"
  misc_feature (61)..(61): /note="Nucleotide may be methylated to form 5-methylcytosine"
ttaaatatgtttgcaaattttattataaaaatgcaatggctttgttctctccatggcttccgggaggccccaggagtaggcttccctggctgcccaaggtctaaacatgagctgttggctga

SEQ ID NO: 4958 - DNA, 122 bp, Homo sapiens
  misc_feature (61)..(62): /note="This region represents a CpG dinucleotide"
  misc_feature (61)..(61): /note="Nucleotide may be methylated to form 5-methylcytosine"
gagtttattaggactcacatgtggggcactcgtgggcagcaggacaactctagagatgagcgtgcttctgtccctaagctgcttttgagctaattttctgcctctttgcgccgtctgtgtga

SEQ ID NO: 4959 - DNA, 122 bp, Homo sapiens
  misc_feature (61)..(62): /note="This region represents a CpG dinucleotide"
  misc_feature (61)..(61): /note="Nucleotide may be methylated to form 5-methylcytosine"
gacagacttagtataatattcttgacttaggactattttacttatctctctaactggcaccgaattaactttttatagcctgagtacaggaatgccccatggtgtttttgttttgttttgtt

SEQ ID NO: 4960 - DNA, 122 bp, Homo sapiens
  misc_feature (61)..(62): /note="This region represents a CpG dinucleotide"
  misc_feature (61)..(61): /note="Nucleotide may be methylated to form 5-methylcytosine"
aaggttactgacagctgccagcagtcttctttgcacaaatcctcttggtgtttgttcaggcgtgtgacttgtctggaccaccagggtgtgaactctaacttgggagacaggagaggcaggtc

SEQ ID NO: 4961 - DNA, 122 bp, Homo sapiens
  misc_feature (61)..(62): /note="This region represents a CpG dinucleotide"
  misc_feature (61)..(61): /note="Nucleotide may be methylated to form 5-methylcytosine"
taatcagcaaatgctggaggtatcagcctcagcccggcagcagttttacttgtgaccaagcgtggctgtgatgctttattctccaggagtcctagactctgaagattctgcaccctaatgaa

SEQ ID NO: 4962 - DNA, 122 bp, Homo sapiens
  misc_feature (61)..(62): /note="This region represents a CpG dinucleotide"
  misc_feature (61)..(61): /note="Nucleotide may be methylated to form 5-methylcytosine"
aactccgttgtttctgttttggttcattgttatattgccagcacctagcacagggcctgacgtatgaaggacaaataatttgttcaacgatccaatgaatggttttaggtggtaggactaga

SEQ ID NO: 4963 - DNA, 122 bp, Homo sapiens
  misc_feature (61)..(62): /note="This region represents a CpG dinucleotide"
  misc_feature (61)..(61): /note="Nucleotide may be methylated to form 5-methylcytosine"
aaaacagatggaatggcagcattttgtgtctgtcttctggagcgtttactagagaattcacggctccttatagttactgatgggtatgcatttggatgaattttctgccatgacaacaggta

SEQ ID NO: 4964 - DNA, 122 bp, Homo sapiens
  misc_feature (61)..(62): /note="This region represents a CpG dinucleotide"
  misc_feature (61)..(61): /note="Nucleotide may be methylated to form 5-methylcytosine"
tccttcctggtaactgcaacacttcctctgcatctggatatgaagggagccccagaaaagcggaagaatttagacgcacactgggtaggtttgaatttgttttgttttcaaaaattaaacaa

SEQ ID NO: 4965 - DNA, 122 bp, Homo sapiens
  misc_feature (61)..(62): /note="This region represents a CpG dinucleotide"
  misc_feature (61)..(61): /note="Nucleotide may be methylated to form 5-methylcytosine"
gggtgtcctttggccacaatcctcaggattattttttctctgtgctgttcactgtaacatcgtccaccctctgagatcttgcttttcagtctactggtatctccacttctctctgcagcgtg

SEQ ID NO: 4966 - DNA, 122 bp, Homo sapiens
  misc_feature (61)..(62): /note="This region represents a CpG dinucleotide"
  misc_feature (61)..(61): /note="Nucleotide may be methylated to form 5-methylcytosine"
aagtctgaagtatagaaaagatgtctcggatggagaatagttgagtcattgtgtaggaaacgtttagatttatcataaaggaagattatacagagagaaggaagcagagaggtgaatacaga

SEQ ID NO: 4967 - DNA, 122 bp, Homo sapiens
  misc_feature (61)..(62): /note="This region represents a CpG dinucleotide"
  misc_feature (61)..(61): /note="Nucleotide may be methylated to form 5-methylcytosine"
tggatcaagcctcaaaacaatgcgatcaaggacagactatcatcatcctcgttttgcagacgaggaaaccaaggtacagagcggttaaatatttgctccaggtcacaaactaggtcatgggg

SEQ ID NO: 4968 - DNA, 122 bp, Homo sapiens
  misc_feature (61)..(62): /note="This region represents a CpG dinucleotide"
  misc_feature (61)..(61): /note="Nucleotide may be methylated to form 5-methylcytosine"
gtgagttcatgctaggcttggagcgactattgtttgtaaaaggtataattatcctgctaacgctgtacatatggctcgtgcctggactcgctcgtgcctagaaagagtaaagccatgtcgaa

SEQ ID NO: 4969 - DNA, 122 bp, Homo sapiens
  misc_feature (61)..(62): /note="This region represents a CpG dinucleotide"
  misc_feature (61)..(61): /note="Nucleotide may be methylated to form 5-methylcytosine"
aaggcactcttccctcgattctgtcctctgtgattttttccctactgaaggttaagaaaccgagggtcagagaagacgagtgactggcccaggatgacgcggctatgaggttgtcaagcagg

SEQ ID NO: 4970 - DNA, 122 bp, Homo sapiens
  misc_feature (61)..(62): /note="This region represents a CpG dinucleotide"
  misc_feature (61)..(61): /note="Nucleotide may be methylated to form 5-methylcytosine"
aaaagatcacttgggcaaaaagtaaataagccaccatgttacactgttagtatagaccggcggttctcaatgaggggtgactttgcccccggggacattcagcaatgtcaggagactttttt

SEQ ID NO: 4971 - DNA, 122 bp, Homo sapiens
  misc_feature (61)..(62): /note="This region represents a CpG dinucleotide"
  misc_feature (61)..(61): /note="Nucleotide may be methylated to form 5-methylcytosine"
acagtaccatcaggccaaagaggcctctgccaggagacatttctgaagtctgaaggtgtgcgtaggggtagcataaatgccatggttaatttttaacttccccattggtgagtcctgaatca

SEQ ID NO: 4972 - DNA, 122 bp, Homo sapiens
  misc_feature (61)..(62): /note="This region represents a CpG dinucleotide"
  misc_feature (61)..(61): /note="Nucleotide may be methylated to form 5-methylcytosine"
ttcattgctaagttctaaagccgtcatgactggatcttcactagacaatgacaggtaagccggacttgccaggcctttataggcattaatcctagatctggagtggctaaacgagtcatgct

SEQ ID NO: 4973 - DNA, 122 bp, Homo sapiens
  misc_feature (61)..(62): /note="This region represents a CpG dinucleotide"
  misc_feature (61)..(61): /note="Nucleotide may be methylated to form 5-methylcytosine"
ggacttttaattgatgttttgctggcagactccacaggagctgagtttagtgtacttttccgactgtgcttgtctagtttcctaggattctgaagtagctcatggctgtttccctctgttcc

SEQ ID NO: 4974 - DNA, 122 bp, Homo sapiens
  misc_feature (61)..(62): /note="This region represents a CpG dinucleotide"
  misc_feature (61)..(61): /note="Nucleotide may be methylated to form 5-methylcytosine"
gggctggtgacatcaaggactaatgccacaggaatcaaagtgatgtcgggaacttacagccggcttcccttcaagaagagcagaggctaaaaggaatcgacgtcatgccagacatgggcgtg

SEQ ID NO: 4975 - DNA, 122 bp, Homo sapiens
  misc_feature (61)..(62): /note="This region represents a CpG dinucleotide"
  misc_feature (61)..(61): /note="Nucleotide may be methylated to form 5-methylcytosine"
atgcggtgaggtacgctgggaagggcatgtcccgcggaaagagcagggtggacgatggaccgtctggaaaacaggctgccaggggacagaatcaacacagatttccaagtcacaaaaacacg

SEQ ID NO: 4976 - DNA, 122 bp, Homo sapiens
  misc_feature (61)..(62): /note="This region represents a CpG dinucleotide"
  misc_feature (61)..(61): /note="Nucleotide may be methylated to form 5-methylcytosine"
ctcaactgtaaggacatgtgactggtctccttataagaagaggagattaaaacacagacacgcacagaaggagagatacatgcaaacatcagaggaaaacagctatctacaagccaaggaga

SEQ ID NO: 4977 - DNA, 122 bp, Homo sapiens
  misc_feature (61)..(62): /note="This region represents a CpG dinucleotide"
  misc_feature (61)..(61): /note="Nucleotide may be methylated to form 5-methylcytosine"
agtatgaagactttaattgttattattttaaattaaaaaaaggcagaatacttcatttgacgtcagacttttctgaaatatttggattcaggatgtaaaatattttctgttcaaaattcttt

SEQ ID NO: 4978 - DNA, 122 bp, Homo sapiens
  misc_feature (61)..(62): /note="This region represents a CpG dinucleotide"
  misc_feature (61)..(61): /note="Nucleotide may be methylated to form 5-methylcytosine"
aaccagttgggctgcttccctctgacgcacttgcttctcatccggggagcggggagtctccgtcttcacaagtgggcaggcttcactgagcccagaggcccctggggcagaaggtgaggtgt

SEQ ID NO: 4979 - DNA, 122 bp, Homo sapiens
  misc_feature (61)..(62): /note="This region represents a CpG dinucleotide"
  misc_feature (61)..(61): /note="Nucleotide may be methylated to form 5-methylcytosine"
cccttcccattcccccaacgtgtccctcccataactcctcaaagttcaggatacaccaggcgctgtgattcacaataaagtctgcctttattgatgtgtatcatgtttactatcccgggtaa

SEQ ID NO: 4980 - DNA, 122 bp, Homo sapiens
  misc_feature (61)..(62): /note="This region represents a CpG dinucleotide"
  misc_feature (61)..(61): /note="Nucleotide may be methylated to form 5-methylcytosine"
gcctcctcagggtggctgaattctattcgagagcatcacagggaggtggggaatagttgacgtgtgctgagataaactcttttacaagtatgacactgttgctttatttttttgccccagtc

SEQ ID NO: 4981 - DNA, 122 bp, Homo sapiens
  misc_feature (61)..(62): /note="This region represents a CpG dinucleotide"
  misc_feature (61)..(61): /note="Nucleotide may be methylated to form 5-methylcytosine"
cagcgaaggcgtagtagatgccgatggcggccgagatgaccagcatgcccgcgaacaccacgtagtcccacaccacgaaggtgccgatgccccgtggcgtgtccatggccgcacggtcgcct

SEQ ID NO: 4982 - DNA, 122 bp, Homo sapiens
  misc_feature (61)..(62): /note="This region represents a CpG dinucleotide"
  misc_feature (61)..(61): /note="Nucleotide may be methylated to form 5-methylcytosine"
aggagctgccacaccacctctcctggctctattacctctggtggcaatctcatccctcctcgaatcgtcaacccttctggccaagggtcgggtacacattcagccaagtgctgtgatggaca

SEQ ID NO: 4983 - DNA, 122 bp, Homo sapiens
  misc_feature (61)..(62): /note="This region represents a CpG dinucleotide"
  misc_feature (61)..(61): /note="Nucleotide may be methylated to form 5-methylcytosine"
tggcatttggttcatcccacagcagcagttctgcttaccaaaagttgcccgctaggcactcgcatttcatacctggccccatgccatcgagctgggcttctaacccatttaaagtttgagaa

SEQ ID NO: 4984 - DNA, 122 bp, Homo sapiens
  misc_feature (61)..(62): /note="This region represents a CpG dinucleotide"
  misc_feature (61)..(61): /note="Nucleotide may be methylated to form 5-methylcytosine"
agcatgctaatgcattataattagtgtataatgagcagtgagacaaccagagttcactttcgttgccttgagttttagtgggtttggctggcttctttactgcaacctgttttatcagtaat

SEQ ID NO: 4985 - DNA, 122 bp, Homo sapiens
  misc_feature (61)..(62): /note="This region represents a CpG dinucleotide"
  misc_feature (61)..(61): /note="Nucleotide may be methylated to form 5-methylcytosine"
tgaatgtattccaaagctagcttggaggaggggcacacaacgtcctgcctttcaatgtgccgcttcccctttggagcagaaagcaggcacttttataaggtaagggagcaagtgagcaaggg

SEQ ID NO: 4986 - DNA, 122 bp, Homo sapiens
  misc_feature (61)..(62): /note="This region represents a CpG dinucleotide"
  misc_feature (61)..(61): /note="Nucleotide may be methylated to form 5-methylcytosine"
gactacaccttctgtagcttgggtttggttcccaagttgtcatgtttcaggaatgaagaacgggatattcaagaagacttctctcaaatgacgggctatttacagagcatttagatctggtt

SEQ ID NO: 4987 - DNA, 122 bp, Homo sapiens
  misc_feature (61)..(62): /note="This region represents a CpG dinucleotide"
  misc_feature (61)..(61): /note="Nucleotide may be methylated to form 5-methylcytosine"
agataacatctccctgctgtttaactttgtggtaaggtactgactgtttcagaagctgagcgagaagggatttggttcagagaatcgttcccagtctgataatttcagtgatatttctggaa

SEQ ID NO: 4988 - DNA, 122 bp, Homo sapiens
  misc_feature (61)..(62): /note="This region represents a CpG dinucleotide"
  misc_feature (61)..(61): /note="Nucleotide may be methylated to form 5-methylcytosine"
gacagtgtacacccaggattttgttctcagtctgatagtcatctgaaatgaccaatgatgcgggaagtaccctttccagatgctggctcagccagggccgagtgacctgttgcagagtccat

SEQ ID NO: 4989 - DNA, 122 bp, Homo sapiens
  misc_feature (61)..(62): /note="This region represents a CpG dinucleotide"
  misc_feature (61)..(61): /note="Nucleotide may be methylated to form 5-methylcytosine"
caggcacagtggctcatgcctgtaatcccagcactttgggaggccaaggcggatgaatcacgaggtcaggaatttgatacaagcctgaccaaacatggtgaaaccccatctctactaaaaat

SEQ ID NO: 4990 - DNA, 122 bp, Homo sapiens
  misc_feature (61)..(62): /note="This region represents a CpG dinucleotide"
  misc_feature (61)..(61): /note="Nucleotide may be methylated to form 5-methylcytosine"
gcttgatgacggagacgatgttgtcattttccttgtgtctacagcacctagcacagtgctcggcataaaataggccctcaaatgtaggtggatgataattactgaggagtaaaatttaggaa

SEQ ID NO: 4991 - DNA, 122 bp, Homo sapiens
  misc_feature (61)..(62): /note="This region represents a CpG dinucleotide"
  misc_feature (61)..(61): /note="Nucleotide may be methylated to form 5-methylcytosine"
agtacctacttcataggcttgttgaaaagctaaaggagctaattcacacaatgctttgtacgtagtgaggttcagtaattttagttgtcattatcgttatctgaaggtcctcaagtatcttc

SEQ ID NO: 4992 - DNA, 122 bp, Homo sapiens
  misc_feature (61)..(62): /note="This region represents a CpG dinucleotide"
  misc_feature (61)..(61): /note="Nucleotide may be methylated to form 5-methylcytosine"
taatcttgtatgaaaaggaaagggaaacgcaaactactcaaatacaaaacaacagctgcacggacgggcctgccagagaaacaactgatctgctctgtcacgacctgtttcacggatcccag

SEQ ID NO: 4993 - DNA, 122 bp, Homo sapiens
  misc_feature (61)..(62): /note="This region represents a CpG dinucleotide"
  misc_feature (61)..(61): /note="Nucleotide may be methylated to form 5-methylcytosine"
ggctgctcctacctgatctgctgcttagttagctgaatcaacttgaccaacaagatgtgccgcagccctcgtgcatcccagcttactgatctgtaataacaggcaaatctctgtgtgccaca

SEQ ID NO: 4994 - DNA, 122 bp, Homo sapiens
  misc_feature (61)..(62): /note="This region represents a CpG dinucleotide"
  misc_feature (61)..(61): /note="Nucleotide may be methylated to form 5-methylcytosine"
ggggaagcagttccggtgaccccctcccgcccctctctcatcaaccccgccccctgggcccgccccgtcccgcccggctactcactggattcgcttcccacataacggtgacaaaatcgagc

SEQ ID NO: 4995 - DNA, 122 bp, Homo sapiens
  misc_feature (61)..(62): /note="This region represents a CpG dinucleotide"
  misc_feature (61)..(61): /note="Nucleotide may be methylated to form 5-methylcytosine"
atttaccaaattttatgaccttcaattctctgcatatgactcagagtcctatgacatgcacgtttaaacatgtgatctatgtggctttggagtttgaggatatataaatgttgattccactt

SEQ ID NO: 4996 - DNA, 122 bp, Homo sapiens
  misc_feature (61)..(62): /note="This region represents a CpG dinucleotide"
  misc_feature (61)..(61): /note="Nucleotide may be methylated to form 5-methylcytosine"
gcccttggacagataacagctttgaacctctttctgaactgtgaagtgggacaatggtaacgactttatgagacatctagccaggtgctacaaaacagtgccctgcgtgtctaggctaaccc

SEQ ID NO: 4997 - DNA, 122 bp, Homo sapiens
  misc_feature (61)..(62): /note="This region represents a CpG dinucleotide"
  misc_feature (61)..(61): /note="Nucleotide may be methylated to form 5-methylcytosine"
tgtgtggaggtgactcacccaagctcagctgagcggagtatattcctcatgcatttggtccgtctacatttgtaagtttggcaagggagtgagcatttgtttttatcttccatatggcagga

SEQ ID NO: 4998 - DNA, 122 bp, Homo sapiens
  misc_feature (61)..(62): /note="This region represents a CpG dinucleotide"
  misc_feature (61)..(61): /note="Nucleotide may be methylated to form 5-methylcytosine"
gggacggtttttagtgtgttttccattcctggctctttaatctttgtaggcatacttctccgccttcccaccacccggattcatagtgtgaattcctgcccggccctgagtcatacccaggc

SEQ ID NO: 4999 - DNA, 122 bp, Homo sapiens
  misc_feature (61)..(62): /note="This region represents a CpG dinucleotide"
  misc_feature (61)..(61): /note="Nucleotide may be methylated to form 5-methylcytosine"
cctgttttgtatcttcaggatgaagctttttgactgtgttgttcatgtcctatttcctggcgcctggcacacactgacactcacatatttgttgaataacatgtcattttttcctgatcttg

SEQ ID NO: 5000 - DNA, 122 bp, Homo sapiens
  misc_feature (61)..(62): /note="This region represents a CpG dinucleotide"
  misc_feature (61)..(61): /note="Nucleotide may be methylated to form 5-methylcytosine"
ataactgacaggactgtctctttttggaatcatgatcttcaagctaatcattttctgtcacgggagagcaacaactatctggaccggtggcacaggggtaaaagaatttaccaagacagttg

SEQ ID NO: 5001 - DNA, 600 bp, Homo sapiens
ccgtcgccgctcgcccttggccgcgccagccgcagggtcctcggcgcccgggggcggcagcaggttggagcgcaccgtgcgcgtcctgccctctcggcgcctccgccgtcccggaggcccgggctcctcggtccccgccggctcccgctccatggccgcgtgtcgccgcgcccggctcctccgccgctcacgcccgcccgcgccggcctcttaggttatcatcactcgcggcccgggcgcggcggtgcgagctccccgcctgcgggacgcacggagaccgcggtcagcgcgccgcctggccggcccagcgcgcccagcccgcgcccagccccgtccactcccgtccagccccgccgcccggccgcagtccccagggcgcaagctgggcgggtgccgcacagagcccccttgtcctcgccgcccgcccccggcccgggtcgtttccgccgcggtggccacggccccgccctcgttccgcgcccggactgggccacgccggatagcgggaaacaaaaaaagcccgagctggaaacttcagagaggtttagtttcgtttcccagaagcatcagttcggtcccaaaacgctgcaaacgcgcgct

SEQ ID NO: 5002 - DNA, 600 bp, Homo sapiens
tcgcccttggccgcgccagccgcagggtcctcggcgcccgggggcggcagcaggttggagcgcaccgtgcgcgtcctgccctctcggcgcctccgccgtcccggaggcccgggctcctcggtccccgccggctcccgctccatggccgcgtgtcgccgcgcccggctcctccgccgctcacgcccgcccgcgccggcctcttaggttatcatcactcgcggcccgggcgcggcggtgcgagctccccgcctgcgggacgcacggagaccgcggtcagcgcgccgcctggccggcccagcgcgcccagcccgcgcccagccccgtccactcccgtccagccccgccgcccggccgcagtccccagggcgcaagctgggcgggtgccgcacagagcccccttgtcctcgccgcccgcccccggcccgggtcgtttccgccgcggtggccacggccccgccctcgttccgcgcccggactgggccacgccggatagcgggaaacaaaaaaagcccgagctggaaacttcagagaggtttagtttcgtttcccagaagcatcagttcggtcccaaaacgctgcaaacgcgcgctgcctgcagta

SEQ ID NO: 5003 - DNA, 600 bp, Homo sapiens
gccgcgccagccgcagggtcctcggcgcccgggggcggcagcaggttggagcgcaccgtgcgcgtcctgccctctcggcgcctccgccgtcccggaggcccgggctcctcggtccccgccggctcccgctccatggccgcgtgtcgccgcgcccggctcctccgccgctcacgcccgcccgcgccggcctcttaggttatcatcactcgcggcccgggcgcggcggtgcgagctccccgcctgcgggacgcacggagaccgcggtcagcgcgccgcctggccggcccagcgcgcccagcccgcgcccagccccgtccactcccgtccagccccgccgcccggccgcagtccccagggcgcaagctgggcgggtgccgcacagagcccccttgtcctcgccgcccgcccccggcccgggtcgtttccgccgcggtggccacggccccgccctcgttccgcgcccggactgggccacgccggatagcgggaaacaaaaaaagcccgagctggaaacttcagagaggtttagtttcgtttcccagaagcatcagttcggtcccaaaacgctgcaaacgcgcgctgcctgcagtaggagagagg

SEQ ID NO: 5004 - DNA, 600 bp, Homo sapiens
gctcgcccttggccgcgccagccgcagggtcctcggcgcccgggggcggcagcaggttggagcgcaccgtgcgcgtcctgccctctcggcgcctccgccgtcccggaggcccgggctcctcggtccccgccggctcccgctccatggccgcgtgtcgccgcgcccggctcctccgccgctcacgcccgcccgcgccggcctcttaggttatcatcactcgcggcccgggcgcggcggtgcgagctccccgcctgcgggacgcacggagaccgcggtcagcgcgccgcctggccggcccagcgcgcccagcccgcgcccagccccgtccactcccgtccagccccgccgcccggccgcagtccccagggcgcaagctgggcgggtgccgcacagagcccccttgtcctcgccgcccgcccccggcccgggtcgtttccgccgcggtggccacggccccgccctcgttccgcgcccggactgggccacgccggatagcgggaaacaaaaaaagcccgagctggaaacttcagagaggtttagtttcgtttcccagaagcatcagttcggtcccaaaacgctgcaaacgcgcgctgcctgcag

SEQ ID NO: 5005 - DNA, 600 bp, Homo sapiens
cgcgccagccgcagggtcctcggcgcccgggggcggcagcaggttggagcgcaccgtgcgcgtcctgccctctcggcgcctccgccgtcccggaggcccgggctcctcggtccccgccggctcccgctccatggccgcgtgtcgccgcgcccggctcctccgccgctcacgcccgcccgcgccggcctcttaggttatcatcactcgcggcccgggcgcggcggtgcgagctccccgcctgcgggacgcacggagaccgcggtcagcgcgccgcctggccggcccagcgcgcccagcccgcgcccagccccgtccactcccgtccagccccgccgcccggccgcagtccccagggcgcaagctgggcgggtgccgcacagagcccccttgtcctcgccgcccgcccccggcccgggtcgtttccgccgcggtggccacggccccgccctcgttccgcgcccggactgggccacgccggatagcgggaaacaaaaaaagcccgagctggaaacttcagagaggtttagtttcgtttcccagaagcatcagttcggtcccaaaacgctgcaaacgcgcgctgcctgcagtaggagagaggaa

SEQ ID NO: 5006 - DNA, 600 bp, Homo sapiens
ttttcaccattttacagtcgaagaagggaagataagaggcggtgaatccgagactttcattcaggtgacgatccctcgcgggcactcactctcgctcacactacaatcagatcctccatgcggctttcatatactctgtcacactcgcagccagaatcccctcggatggactcttgcaaacctccagccccatcccgggatccgtgcgtcttctacagccaccacttgggccagcgtccaggacgcccaagcgtaacctccccactctaaaccgttaggaatcagtggctggactcaccgcgtcataaaagcataaactgtgacccgatgagtccgcgcactcggaaaacaagagaacgctcccacgtctccgggcgcagcttgtgccagcgactactaggtcagggggcgcagctgagagaattcaagcaacctccccgcaaccggttccgccgcgtttgtgggctggtagcccggaatacatttcccagaggccttcgcggccgacgtgcttcgcgcaggaacgcagccgcctcccgactggaggacgcggtagcggagctgctcaaagcgaggtgctcagccctgggaggctcaggg

SEQ ID NO: 5007 - DNA, 600 bp, Homo sapiens
ttcgttgatatttgtgctcacttattagcggtaaattattaattttagataagcccatcacagagtgaaggctcaatccttgaacagcccagggagaacttcgttgctacttttgaaaagccctttgatgtgcccaaagtctccagaagggcgatgccaaacccactcaactttgacaaagtgtgaaacgtctgtaaaaaggagttctctgatgtgtgagaggagacggaaccgagaagaaaaggccgtactctgccccccgcgggacccaggtccccgcctgctgcagagcgcactctgcgcacgtcgagccgcgaaaggttcacagaagaaaacaagagaaagaagtagcaggcactgaggagccgccggcgccggcgcccaggacggcacgtgacccgggggcggggccgcgcgggccgcgggccagtggatggggacgggggcggggccgcggctcggggggcggggtctgtggcggcgcagcttacaccgcggtccccttatttggatctgcgggaatgtgggctggagaggtcctgccgtggtaccagcctccagcctgcccccaggactgcccctgacccaggcgcgcccgct

SEQ ID NO: 5008 - DNA, 600 bp, Homo sapiens
tgtgctcacttattagcggtaaattattaattttagataagcccatcacagagtgaaggctcaatccttgaacagcccagggagaacttcgttgctacttttgaaaagccctttgatgtgcccaaagtctccagaagggcgatgccaaacccactcaactttgacaaagtgtgaaacgtctgtaaaaaggagttctctgatgtgtgagaggagacggaaccgagaagaaaaggccgtactctgccccccgcgggacccaggtccccgcctgctgcagagcgcactctgcgcacgtcgagccgcgaaaggttcacagaagaaaacaagagaaagaagtagcaggcactgaggagccgccggcgccggcgcccaggacggcacgtgacccgggggcggggccgcgcgggccgcgggccagtggatggggacgggggcggggccgcggctcggggggcggggtctgtggcggcgcagcttacaccgcggtccccttatttggatctgcgggaatgtgggctggagaggtcctgccgtggtaccagcctccagcctgcccccaggactgcccctgacccaggcgcgcccgctgctcggtggcag

SEQ ID NO: 5009 - DNA, 600 bp, Homo sapiens
atatttgtgctcacttattagcggtaaattattaattttagataagcccatcacagagtgaaggctcaatccttgaacagcccagggagaacttcgttgctacttttgaaaagccctttgatgtgcccaaagtctccagaagggcgatgccaaacccactcaactttgacaaagtgtgaaacgtctgtaaaaaggagttctctgatgtgtgagaggagacggaaccgagaagaaaaggccgtactctgccccccgcgggacccaggtccccgcctgctgcagagcgcactctgcgcacgtcgagccgcgaaaggttcacagaagaaaacaagagaaagaagtagcaggcactgaggagccgccggcgccggcgcccaggacggcacgtgacccgggggcggggccgcgcgggccgcgggccagtggatggggacgggggcggggccgcggctcggggggcggggtctgtggcggcgcagcttacaccgcggtccccttatttggatctgcgggaatgtgggctggagaggtcctgccgtggtaccagcctccagcctgcccccaggactgcccctgacccaggcgcgcccgctgctcggt

SEQ ID NO: 5010 - DNA, 600 bp, Homo sapiens
tgctcacttattagcggtaaattattaattttagataagcccatcacagagtgaaggctcaatccttgaacagcccagggagaacttcgttgctacttttgaaaagccctttgatgtgcccaaagtctccagaagggcgatgccaaacccactcaactttgacaaagtgtgaaacgtctgtaaaaaggagttctctgatgtgtgagaggagacggaaccgagaagaaaaggccgtactctgccccccgcgggacccaggtccccgcctgctgcagagcgcactctgcgcacgtcgagccgcgaaaggttcacagaagaaaacaagagaaagaagtagcaggcactgaggagccgccggcgccggcgcccaggacggcacgtgacccgggggcggggccgcgcgggccgcgggccagtggatggggacgggggcggggccgcggctcggggggcggggtctgtggcggcgcagcttacaccgcggtccccttatttggatctgcgggaatgtgggctggagaggtcctgccgtggtaccagcctccagcctgcccccaggactgcccctgacccaggcgcgcccgctgctcggtggcagga

SEQ ID NO: 5011 - DNA, 600 bp, Homo sapiens
ttgatatttgtgctcacttattagcggtaaattattaattttagataagcccatcacagagtgaaggctcaatccttgaacagcccagggagaacttcgttgctacttttgaaaagccctttgatgtgcccaaagtctccagaagggcgatgccaaacccactcaactttgacaaagtgtgaaacgtctgtaaaaaggagttctctgatgtgtgagaggagacggaaccgagaagaaaaggccgtactctgccccccgcgggacccaggtccccgcctgctgcagagcgcactctgcgcacgtcgagccgcgaaaggttcacagaagaaaacaagagaaagaagtagcaggcactgaggagccgccggcgccggcgcccaggacggcacgtgacccgggggcggggccgcgcgggccgcgggccagtggatggggacgggggcggggccgcggctcggggggcggggtctgtggcggcgcagcttacaccgcggtccccttatttggatctgcgggaatgtgggctggagaggtcctgccgtggtaccagcctccagcctgcccccaggactgcccctgacccaggcgcgcccgctgctc

SEQ ID NO: 5012 - DNA, 600 bp, Homo sapiens
tgtacacacacacaaaatataccatacagagtgtaaggttcatgacgtctttctttcgttgatatttgtgctcacttattagcggtaaattattaattttagataagcccatcacagagtgaaggctcaatccttgaacagcccagggagaacttcgttgctacttttgaaaagccctttgatgtgcccaaagtctccagaagggcgatgccaaacccactcaactttgacaaagtgtgaaacgtctgtaaaaaggagttctctgatgtgtgagaggagacggaaccgagaagaaaaggccgtactctgccccccgcgggacccaggtccccgcctgctgcagagcgcactctgcgcacgtcgagccgcgaaaggttcacagaagaaaacaagagaaagaagtagcaggcactgaggagccgccggcgccggcgcccaggacggcacgtgacccgggggcggggccgcgcgggccgcgggccagtggatggggacgggggcggggccgcggctcggggggcggggtctgtggcggcgcagcttacaccgcggtccccttatttggatctgcgggaatgtgggctggagaggtcctgccgt

SEQ ID NO: 5013 - DNA, 600 bp, Homo sapiens
atacatgtatatgtaaaatatgtacacacacacaaaatataccatacagagtgtaaggttcatgacgtctttctttcgttgatatttgtgctcacttattagcggtaaattattaattttagataagcccatcacagagtgaaggctcaatccttgaacagcccagggagaacttcgttgctacttttgaaaagccctttgatgtgcccaaagtctccagaagggcgatgccaaacccactcaactttgacaaagtgtgaaacgtctgtaaaaaggagttctctgatgtgtgagaggagacggaaccgagaagaaaaggccgtactctgccccccgcgggacccaggtccccgcctgctgcagagcgcactctgcgcacgtcgagccgcgaaaggttcacagaagaaaacaagagaaagaagtagcaggcactgaggagccgccggcgccggcgcccaggacggcacgtgacccgggggcggggccgcgcgggccgcgggccagtggatggggacgggggcggggccgcggctcggggggcggggtctgtggcggcgcagcttacaccgcggtccccttatttggatctgcgggaatgtg

SEQ ID NO: 5014 - DNA, 600 bp, Homo sapiens
ccggaggatcgcactcgctcatccttacacaccacacacacacacacacacacacacacacacacactgccgctagcgccccccacgccacaagccggaatgcggaggtcagagccactgtccacttgaaagcaggaaagcaggggctgaaacgctgagatggaggcggaggctctggcctcatctgcgaggttcgcaccttcccggaaggcccccccctcccccgcgtttccccagggcgagcaaggtctagcttctgagactccgctctctgggctagcggttcgagctgcaggggggcggggacggattcggagggagcactagagagagagcccgcgctcactcctgccctcctcgcaaagaactggccagccccactcgcgtccagcccacaactaggctgccgggaccggggagccagaccccaggtcgctccaactccggcgagggcggggaggggagtgacagcagcaactagcgcgcgctggcaaaagcacagagtctcggaataggctaaacggccggcgcggaggggtggaggcaagagggggcggaggaggagttgcccgagcggagagggatgacgtcctccagggc

SEQ ID NO: 5015 - DNA, 600 bp, Homo sapiens
cccagtcccagaacctccacccctttcgaattcttcccaacgggctgaccctgcccggcgcccaggagcgccctgggtatctcctggctgctctcccgaatccttgcgcgccgcgcccctaccaggttcactgggtgcacgtagccgttctcatagcggtcctcctgcaacagctgccgcaggtgagcgatgtaactggaagccagccggagcgtgtccagcttggagagcttagtgtcggggggcacccagggcaggctggtcttgagcctggagaaggctttgctcagcacgcgcatccgggcacgctcacgggcgttggccgcgttccgctgcgactgcttgcactctgcggctgagcccttggccgggaggggcttcttgccaccaccgcccgcgctaccacctgcgccgccgcccccagccacacggggccgcttcctcttgcagccttccgcgctgccggctgtgcccagagcgcagcgctcctcctcgccgtcggggtcctcctcctctgccgacgagttgtcactgggcgaggcgtagctgcgctctacgccgcggaggggcggcctcttggaggcggggaccgggtactcc

SEQ ID NO: 5016 - DNA, 600 bp, Homo sapiens
gaatccttgcgcgccgcgcccctaccaggttcactgggtgcacgtagccgttctcatagcggtcctcctgcaacagctgccgcaggtgagcgatgtaactggaagccagccggagcgtgtccagcttggagagcttagtgtcggggggcacccagggcaggctggtcttgagcctggagaaggctttgctcagcacgcgcatccgggcacgctcacgggcgttggccgcgttccgctgcgactgcttgcactctgcggctgagcccttggccgggaggggcttcttgccaccaccgcccgcgctaccacctgcgccgccgcccccagccacacggggccgcttcctcttgcagccttccgcgctgccggctgtgcccagagcgcagcgctcctcctcgccgtcggggtcctcctcctctgccgacgagttgtcactgggcgaggcgtagctgcgctctacgccgcggaggggcggcctcttggaggcggggaccgggtactcccgctgcagcccccgaagctccatctcctccggatcactcaccgagcccgtggacatcccgttgtcccccttgcccacacgcgtcctctttcctcccc

SEQ ID NO: 5017 - DNA, 600 bp, Homo sapiens
ccgaatccttgcgcgccgcgcccctaccaggttcactgggtgcacgtagccgttctcatagcggtcctcctgcaacagctgccgcaggtgagcgatgtaactggaagccagccggagcgtgtccagcttggagagcttagtgtcggggggcacccagggcaggctggtcttgagcctggagaaggctttgctcagcacgcgcatccgggcacgctcacgggcgttggccgcgttccgctgcgactgcttgcactctgcggctgagcccttggccgggaggggcttcttgccaccaccgcccgcgctaccacctgcgccgccgcccccagccacacggggccgcttcctcttgcagccttccgcgctgccggctgtgcccagagcgcagcgctcctcctcgccgtcggggtcctcctcctctgccgacgagttgtcactgggcgaggcgtagctgcgctctacgccgcggaggggcggcctcttggaggcggggaccgggtactcccgctgcagcccccgaagctccatctcctccggatcactcaccgagcccgtggacatcccgttgtcccccttgcccacacgcgtcctctttcctcc

SEQ ID NO: 5018 - DNA, 600 bp, Homo sapiens
tcactcgcggcccgggcgcggcggtgcgagctccccgcctgcgggacgcacggagaccgcggtcagcgcgccgcctggccggcccagcgcgcccagcccgcgcccagccccgtccactcccgtccagccccgccgcccggccgcagtccccagggcgcaagctgggcgggtgccgcacagagcccccttgtcctcgccgcccgcccccggcccgggtcgtttccgccgcggtggccacggccccgccctcgttccgcgcccggactgggccacgccggatagcgggaaacaaaaaaagcccgagctggaaacttcagagaggtttagtttcgtttcccagaagcatcagttcggtcccaaaacgctgcaaacgcgcgctgcctgcagtaggagagaggaaaccgcgaagcgcgagaaaaggcgcccccgtccccaagcagcccgcgcgcccttccaggggccagacctgctccatcctggacggcgaaacgacctcgggagaccccggttaggaccttactccagggatcaactggaatcaaaatccaaaggatccatggcatccagtgctccaatttttaagtcttttttacgcaggac

SEQ ID NO: 5019 - DNA, 598 bp, Homo sapiens
ctccccgcctgcgggacgcacggagaccgcggtcagcgcgccgcctggccggcccagcgcgcccagcccgcgcccagccccgtccactcccgtccagccccgccgcccggccgcagtccccagggcgcaagctgggcgggtgccgcacagagcccccttgtcctcgccgcccgcccccggcccgggtcgtttccgccgcggtggccacggccccgccctcgttccgcgcccggactgggccacgccggatagcgggaaacaaaaaaagcccgagctggaaacttcagagaggtttagtttcgtttcccagaagcatcagttcggtcccaaaacgctgcaaacgcgcgctgcctgcagtaggagagaggaaaccgcgaagcgcgagaaaaggcgcccccgtccccaagcagcccgcgcgcccttccaggggccagacctgctccatcctggacggcgaaacgacctcgggagaccccggttaggaccttactccagggatcaactggaatcaaaatccaaaggatccatggcatccagtgctccaatttttaagtcttttttacgcaggacctctgctcctggggagccctgggaaggg

SEQ ID NO: 5020 - DNA, 600 bp, Homo sapiens
tgagaggagacggaaccgagaagaaaaggccgtactctgccccccgcgggacccaggtccccgcctgctgcagagcgcactctgcgcacgtcgagccgcgaaaggttcacagaagaaaacaagagaaagaagtagcaggcactgaggagccgccggcgccggcgcccaggacggcacgtgacccgggggcggggccgcgcgggccgcgggccagtggatggggacgggggcggggccgcggctcggggggcggggtctgtggcggcgcagcttacaccgcggtccccttatttggatctgcgggaatgtgggctggagaggtcctgccgtggtaccagcctccagcctgcccccaggactgcccctgacccaggcgcgcccgctgctcggtggcaggagggccggcggagcgccatggcctgcatcctgaaggtaacgacttggatctgtggctcggacgcgtggttggccagccccttgctgctcagaggcacggagtcagccgcggtcccaccgcatcctcatctcagttgtcttttcctggcattgattttctttttgttcctttggcaaatgcatatggagggagattctgaaaca

SEQ ID NO: 5021 - DNA, 600 bp, Homo sapiens
ggcaacttaaaacatggcgccccgggcgggggatttgtgcaaattggcggagaagggacgcggggaccgagtcgccccttcggccagggatcccagggaggcccccaggccggaggccggggctcaggctctgcgcgccggcccagccactactgcgccgcggcgggcggagcgggcggggggcgcggcgcgcaggctcggcccggtgggggtcccggcgagcgggagggcggttggggaccccggccgcgccgggcgcggggctcgggattcgggagaccgcgcggcgccgaagccacgcgtcagccccactgtcccgcgcgcctcgccccaggcctcgggctcttcctccgcacctcgtaaagccgagaccccctcgcagtcccccactccgagaggcggaaaagttacctgggatcagcagggagcccgggcgcgccgcggcgtggggactaggctcgggcgcgcgtcctcggcggcggtgcgcaggagactcgggcgtggggaggaagccgcagcccagggctgctcgccgctgttccccccgccccctgttgcaggagacaccgaggctccgcggagctgcggcgggggcccacg

SEQ ID NO: 5022 - DNA, 600 bp, Homo sapiens
aaggcccccccctcccccgcgtttccccagggcgagcaaggtctagcttctgagactccgctctctgggctagcggttcgagctgcaggggggcggggacggattcggagggagcactagagagagagcccgcgctcactcctgccctcctcgcaaagaactggccagccccactcgcgtccagcccacaactaggctgccgggaccggggagccagaccccaggtcgctccaactccggcgagggcggggaggggagtgacagcagcaactagcgcgcgctggcaaaagcacagagtctcggaataggctaaacggccggcgcggaggggtggaggcaagagggggcggaggaggagttgcccgagcggagagggatgacgtcctccagggccttgggctccgaggaaccgaagactggtgcgctcgccgggccccgcgcactagctctggggttcgcagaggcgccgcgcccggcttccgcggcagctccaacacagcgcgcaggcggtcgatcccggtcagcttaaaccgggcgcaagccctctgtccccctcaaagcacctctctgctcgtccctagtctccaggtgcccgtctga

SEQ ID NO: 5023 - DNA, 600 bp, Homo sapiens
cagtctgcaacctggtggcagatggagatggaaccaagatttaccctggaagtaggatattagtcaatggctgtcactggggtacaatgttcagaacgatgcaaacagacacggagggttgattcttcttcagggaaatggctggccactcccttgatttgggagaaactaaactggccttctcgttcccagtcccagaacctccacccctttcgaattcttcccaacgggctgaccctgcccggcgcccaggagcgccctgggtatctcctggctgctctcccgaatccttgcgcgccgcgcccctaccaggttcactgggtgcacgtagccgttctcatagcggtcctcctgcaacagctgccgcaggtgagcgatgtaactggaagccagccggagcgtgtccagcttggagagcttagtgtcggggggcacccagggcaggctggtcttgagcctggagaaggctttgctcagcacgcgcatccgggcacgctcacgggcgttggccgcgttccgctgcgactgcttgcactctgcggctgagcccttggccgggaggggcttcttgccaccaccgcccgcgctaccacctgcgcc

SEQ ID NO: 5024 - DNA, 600 bp, Homo sapiens
cctctgcgtccagggcgtgtactgagcccaggctagctgagcgaggctgcagcccctgcgatggcccgggaagaggcaagtgccgcggggccagagcgaggagggaccagcagggcggcctggacccccacttggccgcgcaggcaggaggggcgcgccctctgcggagcgcggcgccgcggcagccgcagcatctggcgctcgctctctctggccggagaggccgcgacacctagcgcggggccgaggctaggaagggcgggccggggagggaggagggcactgggaggaagccgcgggcgaggaagccccgctcctgccgagtgcctggagaggagattcccagccttcctgcccaacccgaaacttttccaacacacgcaggcgtattcctcgcaggattcggcggtcccgagtcgcagtcagggaggaggctcgggaagcacacgtgccctggcacactggaggaggtacacaggcacaccaggagggacagggcctcttgggaggcggctgagggcgtgaaggcagcaggcggccacacatccgaaagggactccctgcgagcgggatcgagcgcttaaaaccctgccacagctt

SEQ ID NO: 5025 - DNA, 600 bp, Homo sapiens
tcttttcttctctcgcactccacctcccactgccccgcaccccctttagcccggtgttccccgctccgctatgattgacgtctggaaagaaagagctttgtgaggggatgattgttattaacttgttatccccggcgggggggcggggaaccgacgtgcccgggtgagcgccggagacccggagcccggggagcgcgggacgagctaccagcgctcgggtggcggccgccagcggccagcgaaggaggctgcgcgccagcccgcccgcggcgcccgggctcaggcgccgtgacggctgcacgcgctgccccgcactctgagggccttcattagctcgctccccgcgccgaggctggggcgggcagcacgctcggaacttctgatctgtttctccatactttctccccctcctactccgcagtgtcaggggctcatgtcagaggagtgcgggcggactacagccctggcggccgggaggactcgcaaaggcgccggggaagagggactggtgagtgcggaggggctcgcgtgctggcaagactggccgtggggaggcggcgcaggacgaagggccgctgtccccgcgctccttccagggcc

SEQ ID NO: 5026 - DNA, 600 bp, Homo sapiens
cgccgtgacggctgcacgcgctgccccgcactctgagggccttcattagctcgctccccgcgccgaggctggggcgggcagcacgctcggaacttctgatctgtttctccatactttctccccctcctactccgcagtgtcaggggctcatgtcagaggagtgcgggcggactacagccctggcggccgggaggactcgcaaaggcgccggggaagagggactggtgagtgcggaggggctcgcgtgctggcaagactggccgtggggaggcggcgcaggacgaagggccgctgtccccgcgctccttccagggcccagctggcccctcctgcagcagacagaggacggggcggagagggtctgggtggggtgggaagcttagctggcccgcgaggagggcagggccgcaagacttctggggtccgaataggtcaggggtcggcagccccagcgggtgcgtagccagagcttggactcggggaagagggcgagaatcgtgacctcaagaagctgggggtggggtggggtggccagggggaagggaggggaggcggtgggggcgcccttgtgggtaggtgggatgcgaaggggaggagggg

SEQ ID NO: 5027 - DNA, 600 bp, Homo sapiens
cagggcaggctggtcttgagcctggagaaggctttgctcagcacgcgcatccgggcacgctcacgggcgttggccgcgttccgctgcgactgcttgcactctgcggctgagcccttggccgggaggggcttcttgccaccaccgcccgcgctaccacctgcgccgccgcccccagccacacggggccgcttcctcttgcagccttccgcgctgccggctgtgcccagagcgcagcgctcctcctcgccgtcggggtcctcctcctctgccgacgagttgtcactgggcgaggcgtagctgcgctctacgccgcggaggggcggcctcttggaggcggggaccgggtactcccgctgcagcccccgaagctccatctcctccggatcactcaccgagcccgtggacatcccgttgtcccccttgcccacacgcgtcctctttcctcccccctggccagtctcgctgtctccgccttccgctccctggcggaggcggaggccagagagcgctccaaggaagactaaaaacccaggccgggaagcgcggggtgagaaagcgaggtgggtggcgagagcgtgagcgcccctctgctgaccccgg

SEQ ID NO: 5028 - DNA, 600 bp, Homo sapiens
aggctgcgcgccagcccgcccgcggcgcccgggctcaggcgccgtgacggctgcacgcgctgccccgcactctgagggccttcattagctcgctccccgcgccgaggctggggcgggcagcacgctcggaacttctgatctgtttctccatactttctccccctcctactccgcagtgtcaggggctcatgtcagaggagtgcgggcggactacagccctggcggccgggaggactcgcaaaggcgccggggaagagggactggtgagtgcggaggggctcgcgtgctggcaagactggccgtggggaggcggcgcaggacgaagggccgctgtccccgcgctccttccagggcccagctggcccctcctgcagcagacagaggacggggcggagagggtctgggtggggtgggaagcttagctggcccgcgaggagggcagggccgcaagacttctggggtccgaataggtcaggggtcggcagccccagcgggtgcgtagccagagcttggactcggggaagagggcgagaatcgtgacctcaagaagctgggggtggggtggggtggccagggggaagggaggggaggcggtggggg

SEQ ID NO: 5029 - DNA, 600 bp, Homo sapiens
tgctcagcacgcgcatccgggcacgctcacgggcgttggccgcgttccgctgcgactgcttgcactctgcggctgagcccttggccgggaggggcttcttgccaccaccgcccgcgctaccacctgcgccgccgcccccagccacacggggccgcttcctcttgcagccttccgcgctgccggctgtgcccagagcgcagcgctcctcctcgccgtcggggtcctcctcctctgccgacgagttgtcactgggcgaggcgtagctgcgctctacgccgcggaggggcggcctcttggaggcggggaccgggtactcccgctgcagcccccgaagctccatctcctccggatcactcaccgagcccgtggacatcccgttgtcccccttgcccacacgcgtcctctttcctcccccctggccagtctcgctgtctccgccttccgctccctggcggaggcggaggccagagagcgctccaaggaagactaaaaacccaggccgggaagcgcggggtgagaaagcgaggtgggtggcgagagcgtgagcgcccctctgctgaccccggggagcgtggactacgagttggcgcccaagtccag

SEQ ID NO: 5030 - DNA, 600 bp, Homo sapiens
agcagcggcggagccggagccgccagagccagagccggagctgcggcggcgtggacccggcaggggcgggcctcggacagcagagacgcagcgggcccggccgaccgggctgcgggagtggccccgggcatggggcggccggcgggggccgcgggcgggcgctgcgcttcgggctggcggcgggctgcgtgagcggccgggacgcaggatgcgctccgagggtgcggcccccgggccggcggcgccgctgtgcggggcgctgagcctgctgctgggcgcgctgctgggcaaaggtaaggccggggcgggtgcctggcgcgccgacgcatgcgaacttcccggttccgggggagctcggggtgagggcagccgaagcgaggggtgcggcgggggcctcggcgggggctcggatcccatcaacagcgcctctgcgggtgccgagccgcccctaatccagaagggcgctcccagctgggcgccgggatccgggcaagttaggctggtcccgagtcccgaatctcccaccccggaccccccagacccagagctgccccgcggatgaggagggggcgtggctgagggacacggtgtttgttcccc

SEQ ID NO: 5031 - DNA, 600 bp, Homo sapiens
tcgcgggcactcactctcgctcacactacaatcagatcctccatgcggctttcatatactctgtcacactcgcagccagaatcccctcggatggactcttgcaaacctccagccccatcccgggatccgtgcgtcttctacagccaccacttgggccagcgtccaggacgcccaagcgtaacctccccactctaaaccgttaggaatcagtggctggactcaccgcgtcataaaagcataaactgtgacccgatgagtccgcgcactcggaaaacaagagaacgctcccacgtctccgggcgcagcttgtgccagcgactactaggtcagggggcgcagctgagagaattcaagcaacctccccgcaaccggttccgccgcgtttgtgggctggtagcccggaatacatttcccagaggccttcgcggccgacgtgcttcgcgcaggaacgcagccgcctcccgactggaggacgcggtagcggagctgctcaaagcgaggtgctcagccctgggaggctcagggctgcccgaggggcttagtcccagagccagtgctgtcaggggctgagcatgtgaatagggcagtcggaagaccatg

SEQ ID NO: 5032 - DNA, 598 bp, Homo sapiens
cgccctggaattgccgcggcggcggatgcagaggccaacccagagtgcaaccatggagacgcgacgtgtgtcccatagtaacctgttacaacattatttataagctgccatccctagccttcccccgcttcccctccgctccctcgccagacttgcgggcgacgggcacagccgcgtctggctcttcccggcctctcccttctctcgcgggcgcagccgatcaatagttaacacccggctgcggacggcggctccatccgcggcaatcaccgtagtgcttgtttgtggaagccgagcgtgcgtgcgccgcgcgcgcacccagtccagcgcggagtgggcgtctacccgaggaggggtgtctggggaggggctgccctcgttacccaaacagtttgcgctcgcttaaccttgatgcagctcgaggcttcccagtccagctcagttcagacagaaaacctggcgcgcgcgcgcgcacacacacacgcctcccctggcgtcgccgcccggccgggtccctgcccttagggaccagagcggcgaccgctgcaccccgcaccgcctgctggaggagcccccggagccggggccgagccgccgg

SEQ ID NO: 5033 - DNA, 600 bp, Homo sapiens
tctgcgccctggaattgccgcggcggcggatgcagaggccaacccagagtgcaaccatggagacgcgacgtgtgtcccatagtaacctgttacaacattatttataagctgccatccctagccttcccccgcttcccctccgctccctcgccagacttgcgggcgacgggcacagccgcgtctggctcttcccggcctctcccttctctcgcgggcgcagccgatcaatagttaacacccggctgcggacggcggctccatccgcggcaatcaccgtagtgcttgtttgtggaagccgagcgtgcgtgcgccgcgcgcgcacccagtccagcgcggagtgggcgtctacccgaggaggggtgtctggggaggggctgccctcgttacccaaacagtttgcgctcgcttaaccttgatgcagctcgaggcttcccagtccagctcagttcagacagaaaacctggcgcgcgcgcgcgcacacacacacgcctcccctggcgtcgccgcccggccgggtccctgcccttagggaccagagcggcgaccgctgcaccccgcaccgcctgctggaggagcccccggagccggggccgagccgcc

SEQ ID NO: 5034 - DNA, 600 bp, Homo sapiens
tgcacctgggctatgaggctggaagcagaaagggggcgccagaaagcgcacgccgcgagggccggcgggaaatgtagtctcacgccggtaaagccacagagcgacgatgaggcgagacgtctgcgttcttctcaggcctgagacccaaccggcccgggcaccagctcctgctggaccccagagcgcctggaaagctccggaacctctcacctgccgcctcctcgggtccaagtgccaccgcggccgcgcccccggcagcccagggcgcgcttccaccacggtaccggtggattcgccgtgcgcagccggaagatggcgcagacgcacaaagcacaccgatgctgcgccatgatagggccggcgccgcagtgtcttccgggaaacatagtctttaggcgtaaaggcagcagcccggccttgaagccggatctcgcgatgtttcagggtgagccggacgcaggcgtgcctgcgcagtgcgcggaggagtgctgttcgtgtgttcgagtccctgggttgcttcctggggtctgtggtgctgggtgtgctatctgcgtgtgattctctagcgagagattgtgggcgagtgaccgagtgggcaag

SEQ ID NO: 5035 - DNA, 600 bp, Homo sapiens
gcgggaaatgtagtctcacgccggtaaagccacagagcgacgatgaggcgagacgtctgcgttcttctcaggcctgagacccaaccggcccgggcaccagctcctgctggaccccagagcgcctggaaagctccggaacctctcacctgccgcctcctcgggtccaagtgccaccgcggccgcgcccccggcagcccagggcgcgcttccaccacggtaccggtggattcgccgtgcgcagccggaagatggcgcagacgcacaaagcacaccgatgctgcgccatgatagggccggcgccgcagtgtcttccgggaaacatagtctttaggcgtaaaggcagcagcccggccttgaagccggatctcgcgatgtttcagggtgagccggacgcaggcgtgcctgcgcagtgcgcggaggagtgctgttcgtgtgttcgagtccctgggttgcttcctggggtctgtggtgctgggtgtgctatctgcgtgtgattctctagcgagagattgtgggcgagtgaccgagtgggcaaggggccgtcactgtgtgtgcgtgattttgacagtgtgtggtggtagcttctgactccgcgtgggt

SEQ ID NO: 5036 - DNA, 600 bp, Homo sapiens
gatccgtgcgtcttctacagccaccacttgggccagcgtccaggacgcccaagcgtaacctccccactctaaaccgttaggaatcagtggctggactcaccgcgtcataaaagcataaactgtgacccgatgagtccgcgcactcggaaaacaagagaacgctcccacgtctccgggcgcagcttgtgccagcgactactaggtcagggggcgcagctgagagaattcaagcaacctccccgcaaccggttccgccgcgtttgtgggctggtagcccggaatacatttcccagaggccttcgcggccgacgtgcttcgcgcaggaacgcagccgcctcccgactggaggacgcggtagcggagctgctcaaagcgaggtgctcagccctgggaggctcagggctgcccgaggggcttagtcccagagccagtgctgtcaggggctgagcatgtgaatagggcagtcggaagaccatgtgtgtctgtggcttttaaatacaccccgaacgtctatctcttttaactggagtatttaatttatttacatttaatatagccactgatagatttaaagctgccattttattatattttcttttt

SEQ ID NO: 5037 - DNA, 600 bp, Homo sapiens
tccgtgcgtcttctacagccaccacttgggccagcgtccaggacgcccaagcgtaacctccccactctaaaccgttaggaatcagtggctggactcaccgcgtcataaaagcataaactgtgacccgatgagtccgcgcactcggaaaacaagagaacgctcccacgtctccgggcgcagcttgtgccagcgactactaggtcagggggcgcagctgagagaattcaagcaacctccccgcaaccggttccgccgcgtttgtgggctggtagcccggaatacatttcccagaggccttcgcggccgacgtgcttcgcgcaggaacgcagccgcctcccgactggaggacgcggtagcggagctgctcaaagcgaggtgctcagccctgggaggctcagggctgcccgaggggcttagtcccagagccagtgctgtcaggggctgagcatgtgaatagggcagtcggaagaccatgtgtgtctgtggcttttaaatacaccccgaacgtctatctcttttaactggagtatttaatttatttacatttaatatagccactgatagatttaaagctgccattttattatattttcttttttt

SEQ ID NO: 5038 - DNA, 600 bp, Homo sapiens
gtcttctacagccaccacttgggccagcgtccaggacgcccaagcgtaacctccccactctaaaccgttaggaatcagtggctggactcaccgcgtcataaaagcataaactgtgacccgatgagtccgcgcactcggaaaacaagagaacgctcccacgtctccgggcgcagcttgtgccagcgactactaggtcagggggcgcagctgagagaattcaagcaacctccccgcaaccggttccgccgcgtttgtgggctggtagcccggaatacatttcccagaggccttcgcggccgacgtgcttcgcgcaggaacgcagccgcctcccgactggaggacgcggtagcggagctgctcaaagcgaggtgctcagccctgggaggctcagggctgcccgaggggcttagtcccagagccagtgctgtcaggggctgagcatgtgaatagggcagtcggaagaccatgtgtgtctgtggcttttaaatacaccccgaacgtctatctcttttaactggagtatttaatttatttacatttaatatagccactgatagatttaaagctgccattttattatattttcttttttttttttag

SEQ ID NO: 5039 - DNA, 600 bp, Homo sapiens
agcgcacgccgcgagggccggcgggaaatgtagtctcacgccggtaaagccacagagcgacgatgaggcgagacgtctgcgttcttctcaggcctgagacccaaccggcccgggcaccagctcctgctggaccccagagcgcctggaaagctccggaacctctcacctgccgcctcctcgggtccaagtgccaccgcggccgcgcccccggcagcccagggcgcgcttccaccacggtaccggtggattcgccgtgcgcagccggaagatggcgcagacgcacaaagcacaccgatgctgcgccatgatagggccggcgccgcagtgtcttccgggaaacatagtctttaggcgtaaaggcagcagcccggccttgaagccggatctcgcgatgtttcagggtgagccggacgcaggcgtgcctgcgcagtgcgcggaggagtgctgttcgtgtgttcgagtccctgggttgcttcctggggtctgtggtgctgggtgtgctatctgcgtgtgattctctagcgagagattgtgggcgagtgaccgagtgggcaaggggccgtcactgtgtgtgcgtgattttgacagtgtgtggtggta

SEQ ID NO: 5040 - DNA, 600 bp, Homo sapiens
gtctcacgccggtaaagccacagagcgacgatgaggcgagacgtctgcgttcttctcaggcctgagacccaaccggcccgggcaccagctcctgctggaccccagagcgcctggaaagctccggaacctctcacctgccgcctcctcgggtccaagtgccaccgcggccgcgcccccggcagcccagggcgcgcttccaccacggtaccggtggattcgccgtgcgcagccggaagatggcgcagacgcacaaagcacaccgatgctgcgccatgatagggccggcgccgcagtgtcttccgggaaacatagtctttaggcgtaaaggcagcagcccggccttgaagccggatctcgcgatgtttcagggtgagccggacgcaggcgtgcctgcgcagtgcgcggaggagtgctgttcgtgtgttcgagtccctgggttgcttcctggggtctgtggtgctgggtgtgctatctgcgtgtgattctctagcgagagattgtgggcgagtgaccgagtgggcaaggggccgtcactgtgtgtgcgtgattttgacagtgtgtggtggtagcttctgactccgcgtgggtcgttgaatgtat

SEQ ID NO: 5041 - DNA, 600 bp, Homo sapiens
tgcgtcttctacagccaccacttgggccagcgtccaggacgcccaagcgtaacctccccactctaaaccgttaggaatcagtggctggactcaccgcgtcataaaagcataaactgtgacccgatgagtccgcgcactcggaaaacaagagaacgctcccacgtctccgggcgcagcttgtgccagcgactactaggtcagggggcgcagctgagagaattcaagcaacctccccgcaaccggttccgccgcgtttgtgggctggtagcccggaatacatttcccagaggccttcgcggccgacgtgcttcgcgcaggaacgcagccgcctcccgactggaggacgcggtagcggagctgctcaaagcgaggtgctcagccctgggaggctcagggctgcccgaggggcttagtcccagagccagtgctgtcaggggctgagcatgtgaatagggcagtcggaagaccatgtgtgtctgtggcttttaaatacaccccgaacgtctatctcttttaactggagtatttaatttatttacatttaatatagccactgatagatttaaagctgccattttattatattttcttttttttttt

SEQ ID NO: 5042 - DNA, 600 bp, Homo sapiens
cgagacgtctgcgttcttctcaggcctgagacccaaccggcccgggcaccagctcctgctggaccccagagcgcctggaaagctccggaacctctcacctgccgcctcctcgggtccaagtgccaccgcggccgcgcccccggcagcccagggcgcgcttccaccacggtaccggtggattcgccgtgcgcagccggaagatggcgcagacgcacaaagcacaccgatgctgcgccatgatagggccggcgccgcagtgtcttccgggaaacatagtctttaggcgtaaaggcagcagcccggccttgaagccggatctcgcgatgtttcagggtgagccggacgcaggcgtgcctgcgcagtgcgcggaggagtgctgttcgtgtgttcgagtccctgggttgcttcctggggtctgtggtgctgggtgtgctatctgcgtgtgattctctagcgagagattgtgggcgagtgaccgagtgggcaaggggccgtcactgtgtgtgcgtgattttgacagtgtgtggtggtagcttctgactccgcgtgggtcgttgaatgtatgactgggaccgtttagcggtggatacacaactgtgt

SEQ ID NO: 5043 - DNA, 600 bp, Homo sapiens
cagagcgacgatgaggcgagacgtctgcgttcttctcaggcctgagacccaaccggcccgggcaccagctcctgctggaccccagagcgcctggaaagctccggaacctctcacctgccgcctcctcgggtccaagtgccaccgcggccgcgcccccggcagcccagggcgcgcttccaccacggtaccggtggattcgccgtgcgcagccggaagatggcgcagacgcacaaagcacaccgatgctgcgccatgatagggccggcgccgcagtgtcttccgggaaacatagtctttaggcgtaaaggcagcagcccggccttgaagccggatctcgcgatgtttcagggtgagccggacgcaggcgtgcctgcgcagtgcgcggaggagtgctgttcgtgtgttcgagtccctgggttgcttcctggggtctgtggtgctgggtgtgctatctgcgtgtgattctctagcgagagattgtgggcgagtgaccgagtgggcaaggggccgtcactgtgtgtgcgtgattttgacagtgtgtggtggtagcttctgactccgcgtgggtcgttgaatgtatgactgggaccgtttagcggt

SEQ ID NO: 5044 - DNA, 600 bp, Homo sapiens
tcaggcctgagacccaaccggcccgggcaccagctcctgctggaccccagagcgcctggaaagctccggaacctctcacctgccgcctcctcgggtccaagtgccaccgcggccgcgcccccggcagcccagggcgcgcttccaccacggtaccggtggattcgccgtgcgcagccggaagatggcgcagacgcacaaagcacaccgatgctgcgccatgatagggccggcgccgcagtgtcttccgggaaacatagtctttaggcgtaaaggcagcagcccggccttgaagccggatctcgcgatgtttcagggtgagccggacgcaggcgtgcctgcgcagtgcgcggaggagtgctgttcgtgtgttcgagtccctgggttgcttcctggggtctgtggtgctgggtgtgctatctgcgtgtgattctctagcgagagattgtgggcgagtgaccgagtgggcaaggggccgtcactgtgtgtgcgtgattttgacagtgtgtggtggtagcttctgactccgcgtgggtcgttgaatgtatgactgggaccgtttagcggtggatacacaactgtgtgcggctgtggaagattgcc

SEQ ID NO: 5045 - DNA, 600 bp, Homo sapiens
tctggggtcttgtaactctctgagaacctcatgaaacaagatttcctctcagattaaaaaaaaaaaaaggcacgcataacagtgaatgcaaaacatccgcaatttcagggggtcggagacccctgcgcacccacctaaggggtccatgcacctgggctatgaggctggaagcagaaagggggcgccagaaagcgcacgccgcgagggccggcgggaaatgtagtctcacgccggtaaagccacagagcgacgatgaggcgagacgtctgcgttcttctcaggcctgagacccaaccggcccgggcaccagctcctgctggaccccagagcgcctggaaagctccggaacctctcacctgccgcctcctcgggtccaagtgccaccgcggccgcgcccccggcagcccagggcgcgcttccaccacggtaccggtggattcgccgtgcgcagccggaagatggcgcagacgcacaaagcacaccgatgctgcgccatgatagggccggcgccgcagtgtcttccgggaaacatagtctttaggcgtaaaggcagcagcccggccttgaagccggatctcgcgatgtttcagggtgagccgg

SEQ ID NO: 5046 - DNA, 600 bp, Homo sapiens
gccgccagagccagagccggagctgcggcggcgtggacccggcaggggcgggcctcggacagcagagacgcagcgggcccggccgaccgggctgcgggagtggccccgggcatggggcggccggcgggggccgcgggcgggcgctgcgcttcgggctggcggcgggctgcgtgagcggccgggacgcaggatgcgctccgagggtgcggcccccgggccggcggcgccgctgtgcggggcgctgagcctgctgctgggcgcgctgctgggcaaaggtaaggccggggcgggtgcctggcgcgccgacgcatgcgaacttcccggttccgggggagctcggggtgagggcagccgaagcgaggggtgcggcgggggcctcggcgggggctcggatcccatcaacagcgcctctgcgggtgccgagccgcccctaatccagaagggcgctcccagctgggcgccgggatccgggcaagttaggctggtcccgagtcccgaatctcccaccccggaccccccagacccagagctgccccgcggatgaggagggggcgtggctgagggacacggtgtttgttccccatccctgagttccgtgcg

SEQ ID NO: 5047 - DNA, 600 bp, Homo sapiens
atcccctcggatggactcttgcaaacctccagccccatcccgggatccgtgcgtcttctacagccaccacttgggccagcgtccaggacgcccaagcgtaacctccccactctaaaccgttaggaatcagtggctggactcaccgcgtcataaaagcataaactgtgacccgatgagtccgcgcactcggaaaacaagagaacgctcccacgtctccgggcgcagcttgtgccagcgactactaggtcagggggcgcagctgagagaattcaagcaacctccccgcaaccggttccgccgcgtttgtgggctggtagcccggaatacatttcccagaggccttcgcggccgacgtgcttcgcgcaggaacgcagccgcctcccgactggaggacgcggtagcggagctgctcaaagcgaggtgctcagccctgggaggctcagggctgcccgaggggcttagtcccagagccagtgctgtcaggggctgagcatgtgaatagggcagtcggaagaccatgtgtgtctgtggcttttaaatacaccccgaacgtctatctcttttaactggagtatttaatttatttacatttaatatagc

SEQ ID NO: 5048 - DNA, 600 bp, Homo sapiens
atttataagctgccatccctagccttcccccgcttcccctccgctccctcgccagacttgcgggcgacgggcacagccgcgtctggctcttcccggcctctcccttctctcgcgggcgcagccgatcaatagttaacacccggctgcggacggcggctccatccgcggcaatcaccgtagtgcttgtttgtggaagccgagcgtgcgtgcgccgcgcgcgcacccagtccagcgcggagtgggcgtctacccgaggaggggtgtctggggaggggctgccctcgttacccaaacagtttgcgctcgcttaaccttgatgcagctcgaggcttcccagtccagctcagttcagacagaaaacctggcgcgcgcgcgcgcacacacacacgcctcccctggcgtcgccgcccggccgggtccctgcccttagggaccagagcggcgaccgctgcaccccgcaccgcctgctggaggagcccccggagccggggccgagccgccggcgtccccgagtgcgccccctgtgcgtgccgccgcgctgttgctcgcagtgtgctggcgccgagctcggtggacacgcgcgcagtcagagctgcctct

SEQ ID NO: 5049 - DNA, 600 bp, Homo sapiens
ataagctgccatccctagccttcccccgcttcccctccgctccctcgccagacttgcgggcgacgggcacagccgcgtctggctcttcccggcctctcccttctctcgcgggcgcagccgatcaatagttaacacccggctgcggacggcggctccatccgcggcaatcaccgtagtgcttgtttgtggaagccgagcgtgcgtgcgccgcgcgcgcacccagtccagcgcggagtgggcgtctacccgaggaggggtgtctggggaggggctgccctcgttacccaaacagtttgcgctcgcttaaccttgatgcagctcgaggcttcccagtccagctcagttcagacagaaaacctggcgcgcgcgcgcgcacacacacacgcctcccctggcgtcgccgcccggccgggtccctgcccttagggaccagagcggcgaccgctgcaccccgcaccgcctgctggaggagcccccggagccggggccgagccgccggcgtccccgagtgcgccccctgtgcgtgccgccgcgctgttgctcgcagtgtgctggcgccgagctcggtggacacgcgcgcagtcagagctgcctctcgcc

SEQ ID NO: 5050 - DNA, 600 bp, Homo sapiens
gtaacctgttacaacattatttataagctgccatccctagccttcccccgcttcccctccgctccctcgccagacttgcgggcgacgggcacagccgcgtctggctcttcccggcctctcccttctctcgcgggcgcagccgatcaatagttaacacccggctgcggacggcggctccatccgcggcaatcaccgtagtgcttgtttgtggaagccgagcgtgcgtgcgccgcgcgcgcacccagtccagcgcggagtgggcgtctacccgaggaggggtgtctggggaggggctgccctcgttacccaaacagtttgcgctcgcttaaccttgatgcagctcgaggcttcccagtccagctcagttcagacagaaaacctggcgcgcgcgcgcgcacacacacacgcctcccctggcgtcgccgcccggccgggtccctgcccttagggaccagagcggcgaccgctgcaccccgcaccgcctgctggaggagcccccggagccggggccgagccgccggcgtccccgagtgcgccccctgtgcgtgccgccgcgctgttgctcgcagtgtgctggcgccgagctcggtggacacgcgc

SEQ ID NO: 5051 - DNA, 600 bp, Homo sapiens
cccaagttctctctgtgtccccctcgcgggccccgcacctcgcgtcccggatcgctctgattccgcgactccttggccgccgctgcgcatggaaagctctgccaagatggagagcggcggcgccggccagcagccccagccgcagccccagcagcccttcctgccgcccgcagcctgtttctttgccacggccgcagccgcggcggccgcagccgccgcagcggcagcgcagagcgcgcagcagcagcagcagcagcagcagcagcagcagcaggcgccgcagctgagaccggcggccgacggccagccctcagggggcggtcacaagtcagcgcccaagcaagtcaagcgacagcgctcgtcttcgcccgaactgatgcgctgcaaacgccggctcaacttcagcggctttggctacagcctgccgcagcagcagccggccgccgtggcgcgccgcaacgagcgcgagcgcaaccgcgtcaagttggtcaacctgggctttgccacccttcgggagcacgtccccaacggcgcggccaacaagaagatgagtaaggtggagacactgcgctcggcggtcgagtacatccgcgcgctgca

SEQ ID NO: 5052 - DNA, 598 bp, Homo sapiens
ccgcacctcgcgtcccggatcgctctgattccgcgactccttggccgccgctgcgcatggaaagctctgccaagatggagagcggcggcgccggccagcagccccagccgcagccccagcagcccttcctgccgcccgcagcctgtttctttgccacggccgcagccgcggcggccgcagccgccgcagcggcagcgcagagcgcgcagcagcagcagcagcagcagcagcagcagcagcaggcgccgcagctgagaccggcggccgacggccagccctcagggggcggtcacaagtcagcgcccaagcaagtcaagcgacagcgctcgtcttcgcccgaactgatgcgctgcaaacgccggctcaacttcagcggctttggctacagcctgccgcagcagcagccggccgccgtggcgcgccgcaacgagcgcgagcgcaaccgcgtcaagttggtcaacctgggctttgccacccttcgggagcacgtccccaacggcgcggccaacaagaagatgagtaaggtggagacactgcgctcggcggtcgagtacatccgcgcgctgcagcagctgctggacgagcatgacgcggtgag

SEQ ID NO: 5053 - DNA, 600 bp, Homo sapiens
agctggatgaagcccaccccgtccccttctggtaccaaagtgcttactcctctccaaagtgccgtgtctgaactgccgctgggaagaagcggctcctgagacgcgcccacacctttcacctgccgcgcgcttccccctcctcggccaccttcccggcggaagcagcgaggagggagccccctttggccgtcctccgtggaaccggttttccgaggctggcaaaagccgaggctggatttgggggaggaatattagactcggaggagtctgcgcgcttttctcctccccgcgcctcccggtcgccgcgggttcaccgctcagtccccgcgctcgctccgcaccccacccacttcctgtgctcgcccggggggcgtgtgccgtgcggctgccggagttcggggaagttgtggctgtcgagaatgggggtctgtgggtacctgttcctgccctggaagtgcctcgtggtcgtgtctctcaggctgctgttccttgtacccacaggagtgcccgtgcgcagcggagatgccaccttccccaaagctatggacaacgtgacggtccggcagggggagagcgccaccctcaggtagggagctgaca

SEQ ID NO: 5054 - DNA, 600 bp, Homo sapiens
tggatgaagcccaccccgtccccttctggtaccaaagtgcttactcctctccaaagtgccgtgtctgaactgccgctgggaagaagcggctcctgagacgcgcccacacctttcacctgccgcgcgcttccccctcctcggccaccttcccggcggaagcagcgaggagggagccccctttggccgtcctccgtggaaccggttttccgaggctggcaaaagccgaggctggatttgggggaggaatattagactcggaggagtctgcgcgcttttctcctccccgcgcctcccggtcgccgcgggttcaccgctcagtccccgcgctcgctccgcaccccacccacttcctgtgctcgcccggggggcgtgtgccgtgcggctgccggagttcggggaagttgtggctgtcgagaatgggggtctgtgggtacctgttcctgccctggaagtgcctcgtggtcgtgtctctcaggctgctgttccttgtacccacaggagtgcccgtgcgcagcggagatgccaccttccccaaagctatggacaacgtgacggtccggcagggggagagcgccaccctcaggtagggagctgacattg

SEQ ID NO: 5055 - DNA, 600 bp, Homo sapiens
caaaagaaagggggtgggcagaaagggagatttccatcccttcaaacgtgcacgcccctcccgcggtcccgggagggagtcccccctcccaggtcgagcgcgtccaccggctgtccccacagcaacaggcgggcggcgggggaggagaggccgcgggggcagcgcaggcctggcggcggccgaaatcccccggccaccacgacgttccccggctctgcggcgcgccgggagcaggtggttgccctctgcgtccagggcgtgtactgagcccaggctagctgagcgaggctgcagcccctgcgatggcccgggaagaggcaagtgccgcggggccagagcgaggagggaccagcagggcggcctggacccccacttggccgcgcaggcaggaggggcgcgccctctgcggagcgcggcgccgcggcagccgcagcatctggcgctcgctctctctggccggagaggccgcgacacctagcgcggggccgaggctaggaagggcgggccggggagggaggagggcactgggaggaagccgcgggcgaggaagccccgctcctgccgagtgcctggagaggagattcccagccttcctgccca

SEQ ID NO: 5056 - DNA, 600 bp, Homo sapiens
agcccgcgctcactcctgccctcctcgcaaagaactggccagccccactcgcgtccagcccacaactaggctgccgggaccggggagccagaccccaggtcgctccaactccggcgagggcggggaggggagtgacagcagcaactagcgcgcgctggcaaaagcacagagtctcggaataggctaaacggccggcgcggaggggtggaggcaagagggggcggaggaggagttgcccgagcggagagggatgacgtcctccagggccttgggctccgaggaaccgaagactggtgcgctcgccgggccccgcgcactagctctggggttcgcagaggcgccgcgcccggcttccgcggcagctccaacacagcgcgcaggcggtcgatcccggtcagcttaaaccgggcgcaagccctctgtccccctcaaagcacctctctgctcgtccctagtctccaggtgcccgtctgagagtccctgtcgcctccgggcggacccggccaggcagcccccggtcgggccagcctcgccccttcctcgctttctcccccatcgacctcgagccaagggcaggcggcccgcacccgcgcccctgcc

SEQ ID NO: 5057 - DNA, 600 bp, Homo sapiens
cgcctctgggtagctggatgaagcccaccccgtccccttctggtaccaaagtgcttactcctctccaaagtgccgtgtctgaactgccgctgggaagaagcggctcctgagacgcgcccacacctttcacctgccgcgcgcttccccctcctcggccaccttcccggcggaagcagcgaggagggagccccctttggccgtcctccgtggaaccggttttccgaggctggcaaaagccgaggctggatttgggggaggaatattagactcggaggagtctgcgcgcttttctcctccccgcgcctcccggtcgccgcgggttcaccgctcagtccccgcgctcgctccgcaccccacccacttcctgtgctcgcccggggggcgtgtgccgtgcggctgccggagttcggggaagttgtggctgtcgagaatgggggtctgtgggtacctgttcctgccctggaagtgcctcgtggtcgtgtctctcaggctgctgttccttgtacccacaggagtgcccgtgcgcagcggagatgccaccttccccaaagctatggacaacgtgacggtccggcagggggagagcgccaccctcaggta

SEQ ID NO: 5058 - DNA, 598 bp, Homo sapiens
aacggcctgggtccggcttcctcctcccctgaagcagcgaaggggcgtcactggcgcgctgttaaacgtcttcgccatcggttccctgcatcctccctcctgcctgggtagccagctcctgggcgcgcccaggcgcacacgcttccctcgctcctcctgcagccacaacgcccccaccccccccgcccgcccgccttgtgcggcagcggtgaccgccttctcctgctgccaccccctccaccccctgttcaaggtctgtcaccgtagggggcgggggggcgcgtggagccgctgggggttcggcccaccccgcgaaccgagctcccggccctgtgcgccctcagctctgccgcgggcgttggcctgggcgggcgcaggactgcctggtcgccctggagctcagggtcggggccccgcgtttaaccaccaggcggaggcgcaggcggagcccggagaggacgcgacccctctgggcggccttgggcccctggacgtgccagactctggacccctgcgggggctgccgtggagagcagaggcaccgcgtcctgcccagagctccgataggcgggccgcgttgggggattgtgggggccgg

SEQ ID NO: 5059 - DNA, 600 bp, Homo sapiens
gaggcaagttatataaaagcggccggcccccctgcccagcggggatgctttgtgcggagcgcaccttatcggccccgcgctgcgcccgcccgcgcctgcacccgggacgagcccgctgccgccgcgcgctgagcgcagggcccctcccgcggcccgccagccgccacccgcccgggcggcgccgcagtgtcgccccctgtcccccgcacctccccgggggaggggccggcccgcgctcgcccccagcccgaggggcaacttaaaacatggcgccccgggcgggggatttgtgcaaattggcggagaagggacgcggggaccgagtcgccccttcggccagggatcccagggaggcccccaggccggaggccggggctcaggctctgcgcgccggcccagccactactgcgccgcggcgggcggagcgggcggggggcgcggcgcgcaggctcggcccggtgggggtcccggcgagcgggagggcggttggggaccccggccgcgccgggcgcggggctcgggattcgggagaccgcgcggcgccgaagccacgcgtcagccccactgtcccgcgcgcctcgccccaggcctcgggctctt

SEQ ID NO: 5060 - DNA, 600 bp, Homo sapiens
ctccaggcactctcaaggatccggttcatgtcttcgccctggcccgcttggtatagggggcgcacaggaagaggccaagaagtggaaagaacctcatctcgatgtcccaagtgacaaagcccccggggctcggggctttggtacagaggagcagcagaagccgccgccgcagacgcccggatgcggaggacccagagcgctgcgcagctgaggagcacctggggagccaccgccggcgccaacttttgccatcccgggagccatagcggcagagagggggtcccggacccgaggtggcagcgaggggctctgctttggcagctgtcggggctggagctcaggaccccaactccagccaagtcgggccgcggcggggcaggcgtaggctgcgcaggcaggggtggccgcgggtgctgagccagtcgccgccgcgcaggcgggcgctggagtctcagctacctggcgcgaccgccagcagcacccagcgcggggccgggagctgctgggggcccaggctccgctctccccaccgctctgcaccgctgccggctgcggacagacccgatgcgccaccaccaccgcagttgccacgacccccat

SEQ ID NO: 5061 - DNA, 600 bp, Homo sapiens
gaaagctctgccaagatggagagcggcggcgccggccagcagccccagccgcagccccagcagcccttcctgccgcccgcagcctgtttctttgccacggccgcagccgcggcggccgcagccgccgcagcggcagcgcagagcgcgcagcagcagcagcagcagcagcagcagcagcagcaggcgccgcagctgagaccggcggccgacggccagccctcagggggcggtcacaagtcagcgcccaagcaagtcaagcgacagcgctcgtcttcgcccgaactgatgcgctgcaaacgccggctcaacttcagcggctttggctacagcctgccgcagcagcagccggccgccgtggcgcgccgcaacgagcgcgagcgcaaccgcgtcaagttggtcaacctgggctttgccacccttcgggagcacgtccccaacggcgcggccaacaagaagatgagtaaggtggagacactgcgctcggcggtcgagtacatccgcgcgctgcagcagctgctggacgagcatgacgcggtgagcgccgccttccaggcaggcgtcctgtcgcccaccatctcccccaactactccaacgacttg

SEQ ID NO: 5062 - DNA, 600 bp, Homo sapiens
cttcttgcctcgccaccgcgtgctcctgggcgcgccccgccgcgggcccttgaggcgcgcggagacaccagcgctggcttcccgggcccgcgggccggggagggaagcctcggggctgcggggtgagaggaagaaagcaaacccggggagcaggcggctgccgcacccgcgcaccccgggccctcaccacgccctccccgcgcgccggctcaggggctgccccggaatcagctccccggggccgccgcaacgaaggtggatccgcatcttgattgttctccgggagcctcctgggggctccggcggcggcgcgggcgcgacccatcccgctggcgctccccgctcgctgaaccccgtttgcctgtccacaccccctcgctccccaccatttttcctgaccggcctgtgtccccgagccctcgcggcaggcccgagcaggcgatcgcggccgggcacgcgcgccccgggctcccgccccccttccgagcatccgccgcctcttttctgctgggtctgggaggagggaggctgggaggccgctcggggcccagcgtgccagccccggagttcagcctcccgagctgcggcgcccgcagcgga

SEQ ID NO: 5063 - DNA, 600 bp, Homo sapiens
agccactactgcgccgcggcgggcggagcgggcggggggcgcggcgcgcaggctcggcccggtgggggtcccggcgagcgggagggcggttggggaccccggccgcgccgggcgcggggctcgggattcgggagaccgcgcggcgccgaagccacgcgtcagccccactgtcccgcgcgcctcgccccaggcctcgggctcttcctccgcacctcgtaaagccgagaccccctcgcagtcccccactccgagaggcggaaaagttacctgggatcagcagggagcccgggcgcgccgcggcgtggggactaggctcgggcgcgcgtcctcggcggcggtgcgcaggagactcgggcgtggggaggaagccgcagcccagggctgctcgccgctgttccccccgccccctgttgcaggagacaccgaggctccgcggagctgcggcgggggcccacgcccagagaccgtgcgaggaaagccaacctcgtcctgcctgccctcccagccgcgggggagggggccaccgcagtacttcaggacagttacatgggcacagcctcctccgtcctggcgcagggtcaggctccgcggacgacgcct

SEQ ID NO: 5064 - DNA, 600 bp, Homo sapiens
cggttggggaccccggccgcgccgggcgcggggctcgggattcgggagaccgcgcggcgccgaagccacgcgtcagccccactgtcccgcgcgcctcgccccaggcctcgggctcttcctccgcacctcgtaaagccgagaccccctcgcagtcccccactccgagaggcggaaaagttacctgggatcagcagggagcccgggcgcgccgcggcgtggggactaggctcgggcgcgcgtcctcggcggcggtgcgcaggagactcgggcgtggggaggaagccgcagcccagggctgctcgccgctgttccccccgccccctgttgcaggagacaccgaggctccgcggagctgcggcgggggcccacgcccagagaccgtgcgaggaaagccaacctcgtcctgcctgccctcccagccgcgggggagggggccaccgcagtacttcaggacagttacatgggcacagcctcctccgtcctggcgcagggtcaggctccgcggacgacgcctggagacagctgccaatgccaatagctttagccctttattcccacttagatgatggcctggcctctccagacccctctcccctccca

SEQ ID NO: 5065 - DNA, 600 bp, Homo sapiens
cgcgtcagccccactgtcccgcgcgcctcgccccaggcctcgggctcttcctccgcacctcgtaaagccgagaccccctcgcagtcccccactccgagaggcggaaaagttacctgggatcagcagggagcccgggcgcgccgcggcgtggggactaggctcgggcgcgcgtcctcggcggcggtgcgcaggagactcgggcgtggggaggaagccgcagcccagggctgctcgccgctgttccccccgccccctgttgcaggagacaccgaggctccgcggagctgcggcgggggcccacgcccagagaccgtgcgaggaaagccaacctcgtcctgcctgccctcccagccgcgggggagggggccaccgcagtacttcaggacagttacatgggcacagcctcctccgtcctggcgcagggtcaggctccgcggacgacgcctggagacagctgccaatgccaatagctttagccctttattcccacttagatgatggcctggcctctccagacccctctcccctcccagacatcccctgtgagaaaggagggagagggtgttcctgaccttcaggtgagttatttattggctaggg

SEQ ID NO: 5066 - DNA, 600 bp, Homo sapiens
gccgaagccacgcgtcagccccactgtcccgcgcgcctcgccccaggcctcgggctcttcctccgcacctcgtaaagccgagaccccctcgcagtcccccactccgagaggcggaaaagttacctgggatcagcagggagcccgggcgcgccgcggcgtggggactaggctcgggcgcgcgtcctcggcggcggtgcgcaggagactcgggcgtggggaggaagccgcagcccagggctgctcgccgctgttccccccgccccctgttgcaggagacaccgaggctccgcggagctgcggcgggggcccacgcccagagaccgtgcgaggaaagccaacctcgtcctgcctgccctcccagccgcgggggagggggccaccgcagtacttcaggacagttacatgggcacagcctcctccgtcctggcgcagggtcaggctccgcggacgacgcctggagacagctgccaatgccaatagctttagccctttattcccacttagatgatggcctggcctctccagacccctctcccctcccagacatcccctgtgagaaaggagggagagggtgttcctgaccttcaggtgagttattta

SEQ ID NO: 5067 - DNA, 600 bp, Homo sapiens
agcggcagcgcagagcgcgcagcagcagcagcagcagcagcagcagcagcagcaggcgccgcagctgagaccggcggccgacggccagccctcagggggcggtcacaagtcagcgcccaagcaagtcaagcgacagcgctcgtcttcgcccgaactgatgcgctgcaaacgccggctcaacttcagcggctttggctacagcctgccgcagcagcagccggccgccgtggcgcgccgcaacgagcgcgagcgcaaccgcgtcaagttggtcaacctgggctttgccacccttcgggagcacgtccccaacggcgcggccaacaagaagatgagtaaggtggagacactgcgctcggcggtcgagtacatccgcgcgctgcagcagctgctggacgagcatgacgcggtgagcgccgccttccaggcaggcgtcctgtcgcccaccatctcccccaactactccaacgacttgaactccatggccggctcgccggtctcatcctactcgtcggacgagggctcttacgacccgctcagccccgaggagcaggagcttctcgacttcaccaactggttctgaggggctcggcctggtcaggc

SEQ ID NO: 5068 - DNA, 600 bp, Homo sapiens
gctcaccagcctatcttgcctaagaatcacaaggtcacgatagcgtcgcgattccactcaccgtacactccttggccagagatcccctccaggaggactgtcagcagccacacgagaccgtacagtaaatccatcttcacgtgaacatgaacatatccagcccagggggtacgcaacgggaccttcaggaggccggcggccagccaggcgcgctccactcgcgcccgggccaagccgaggtgcccgggaaccgctcgccgaaggaggaagcgccgtccgtctgtccttccccggcggcggcggcgagcggagcgcaggagccccgcactccacacactcatgcacacacacactcacacacactcacacactctcccacaacacaataccctgacacacactcacacgcacgccgcactcacaccgggtgcctgggaaaatcgcagacgccggggaggagcagggggcggtgatgggaaggggagctgcgaggcgaagtgttcttcagggaagcgggctcgagtctccgcagctgcggcggcggcggcggcgcgctgggccggcggcgggcgcgggcagggggccgggggtgccgcgcgg

SEQ ID NO: 5069 - DNA, 600 bp, Homo sapiens
ctatcctccacccccggggggttcctgcgcactgaaagaccgttctccggcaggttttgggatccggcgacggctgaccgcgcgccgcccccacgcccggttccacgatgctgcaatacagaaagtttacgtcggccccgacccgcgcgggactgcagggtccgccggagcgcggcgcagaggcttttcctgcgcgttcggccccgggaaaggggcgggagggctggctccgggagcgcacgggcgcggcggggagggtactcactgtgaagcacgctgcgcccatggatcatgtctgtgcgttacaccagaggctccgggctccactaattccatttagagacgggaagacttccagtggcggggggaggacagggtcgagaggtgttaaagacgcaaagcaagaaggaaataaaggggggccgagagggagaccgagaggaagggggagctccgagcccacgctgcagccagatccggatgagtccgtcctccgccccgggcgggctctcgctctcgctggccctcagcgccgcgcagccagcagcatccccaccgtgacgctcgcatcacacccgggcgccggccgccaccatccgc

SEQ ID NO: 5070 - DNA, 600 bp, Homo sapiens
tgggggctccggcggcggcgcgggcgcgacccatcccgctggcgctccccgctcgctgaaccccgtttgcctgtccacaccccctcgctccccaccatttttcctgaccggcctgtgtccccgagccctcgcggcaggcccgagcaggcgatcgcggccgggcacgcgcgccccgggctcccgccccccttccgagcatccgccgcctcttttctgctgggtctgggaggagggaggctgggaggccgctcggggcccagcgtgccagccccggagttcagcctcccgagctgcggcgcccgcagcggaggaggttttcagtggctgattgaaactcactgcaaaatcaccacgactctttcacctactgagatgattgaccgaggtttggccttccatttttactgagatttggcgagaccgaatggaagcgtccgcacagtaactgcagctgctaggccagaggggccccggcgcccttcccgcctcccctcccgcttgcttttgccttactcgatcttaccaccacccctcccccggccccccgactgagaactcgggcctctcacccgccccccagcctcccgctctgggcgagcc

SEQ ID NO: 5071 - DNA, 600 bp, Homo sapiens
cgcagcccggtggggcaaccctgactcggaccgctcgggagagccccaggagaggccagcgccgcgcagcagccgccccgctgcgcccacctccccggctgctcccggagggctcacaaaggcggtggccgcccgagtggccttctccatccaggcgttcgcgtcctcctccccaccttctctcccgaaggcgaaaatggcagggccaggcgagaacctgggacagcggtggccctagccctgcgatcctcacccctcctgctaggagaggctgcgggctgcccgcggacgatgtggccgcggctgctcccgagcgcatcttcggcccgggtccccgccgccacccctcttctctgctccttccatcccgcccagaggagttgatgccgctgtcgccgccgccgccgctgctgaagccgcggctgatggatgccagggagtgccgcattgcttagcgaccccgcctctgggtttgctggtaggagcggctgctctttcttctttcttgctttggggttttatagaaaagataaggacatttttattttattcttcacaacgtcctccccttctcttcgtttttgaaatgtgcattcccag

SEQ ID NO: 5072 - DNA, 600 bp, Homo sapiens
cggtctccagggcggaaaggggtggaagctgaccctcgcccttccctccagcgctggcttcaggtgtgccttctgctacctcctgtactgcgaacaggggcccgccgagctccgggagcccctagaagaggaagactcctctggccccactaggtatcatccgcgctctcccgctttccacctgcgccctcgcttgggccaatctctgccgcacgtgtccatccctgaactgcacgctatcctccacccccggggggttcctgcgcactgaaagaccgttctccggcaggttttgggatccggcgacggctgaccgcgcgccgcccccacgcccggttccacgatgctgcaatacagaaagtttacgtcggccccgacccgcgcgggactgcagggtccgccggagcgcggcgcagaggcttttcctgcgcgttcggccccgggaaaggggcgggagggctggctccgggagcgcacgggcgcggcggggagggtactcactgtgaagcacgctgcgcccatggatcatgtctgtgcgttacaccagaggctccgggctccactaattccatttagagacgggaagacttccagtggcgg

SEQ ID NO: 5073 - DNA, 600 bp, Homo sapiens
agcggccgtccttccccagctcgaagcccgtagcacattcgcaggcaaagcctcccaagtcgtctaggcagttagggagctctgcgcatttgccagcacggaggtacctcccggggcagggacacaacacatcgcccgagagtttgtcccagcgagcgccgatttcgtccgcgatgcaagtaactgagatcgggagctgtccccggcagagcgcactcacctcggtcccaggtggactgaagtccagagcggcgctgtgcagctggaagggcgcgcgatagctcaagttagaggcggccccggggcgcggcgcaggacacaagacctcaaactggtacttgcacaggtagccgttggcgcgcaggtggcatcgcatctccttccagcctgcgggctcgaccccaccggtggcctggagtaccgcgcatctccgcgcggtgcaggagcgttggggctcctccacccactgcagcgtgtcgctttcgagaccgccggggtcggaggacagccaggagaaaccccgcaaaggctcgttctccagggtgcagtgggaacgcctgcgctccagtgcgacccagaacagcaggtctttggagcccc

SEQ ID NO: 5074 - DNA, 600 bp, Homo sapiens
gctgtccttccccactggtcacacaagagcggccgtccttccccagctcgaagcccgtagcacattcgcaggcaaagcctcccaagtcgtctaggcagttagggagctctgcgcatttgccagcacggaggtacctcccggggcagggacacaacacatcgcccgagagtttgtcccagcgagcgccgatttcgtccgcgatgcaagtaactgagatcgggagctgtccccggcagagcgcactcacctcggtcccaggtggactgaagtccagagcggcgctgtgcagctggaagggcgcgcgatagctcaagttagaggcggccccggggcgcggcgcaggacacaagacctcaaactggtacttgcacaggtagccgttggcgcgcaggtggcatcgcatctccttccagcctgcgggctcgaccccaccggtggcctggagtaccgcgcatctccgcgcggtgcaggagcgttggggctcctccacccactgcagcgtgtcgctttcgagaccgccggggtcggaggacagccaggagaaaccccgcaaaggctcgttctccagggtgcagtgggaacgcctgcgctccagtgcga

SEQ ID NO: 5075 - DNA, 601 bp, Homo sapiens
cggctgtccttccccactggtcacacaagagcggccgtccttccccagctcgaagcccgtagcacattcgcaggcaaagcctcccaagtcgtctaggcagttagggagctctgcgcatttgccagcacggaggtacctcccggggcagggacacaacacatcgcccgagagtttgtcccagcgagcgccgatttcgtccgcgatgcaagtaactgagatcgggagctgtccccggcagagcgcactcacctcggtcccaggtggactgaagtccagagcggcgctgtgcagctggaagggcgcgcgatagctcaagttagaggcggccccggggcgcggcgcaggacacaagacctcaaactggtacttgcacaggtagccgttggcgcgcaggtggcatcgcatctccttccagcctgcgggctcgaccccaccggtggcctggagtaccgcgcatctccgcgcggtgcaggagcgttggggctcctccacccactgcagcgtgtcgctttcgagaccgccggggtcggaggacagccaggagaaaccccgcaaaggctcgttctccagggtgcagtgggaacgcctgcgctccagtgcg

SEQ ID NO: 5076 - DNA, 600 bp, Homo sapiens
gcgcgcgatagctcaagttagaggcggccccggggcgcggcgcaggacacaagacctcaaactggtacttgcacaggtagccgttggcgcgcaggtggcatcgcatctccttccagcctgcgggctcgaccccaccggtggcctggagtaccgcgcatctccgcgcggtgcaggagcgttggggctcctccacccactgcagcgtgtcgctttcgagaccgccggggtcggaggacagccaggagaaaccccgcaaaggctcgttctccagggtgcagtgggaacgcctgcgctccagtgcgacccagaacagcaggtctttggagccccctccgggccctgggcctgcccgcaggagcgcgagcacagcgcgcagctcggcgcccgcacgcacggtgctgagcgccccacctcgcaggatgcaggcctcctcggccgcctgccgcttcatggtagcgtggtgcaggctgtagcaggcccccgaggccgagcagccagcacggtcggcagtggggtgttcgccgccgcccggcccgggccagagcgcctgccagaggaggcacagggcgaacgccggcctcattctctgaggccccgcac

SEQ ID NO: 5077 - DNA, 600 bp, Homo sapiens
cccccctctcctttgcaccccattcctgccgctcccacctccccttcccagtcccgccaggtgactgtgtctcatgcagcgaaggcaacaagcgtccccagccgaggaagggaaggggcagccgtcttggctcgcgagggaaggagggcggaagcgggcgcccgctcgcaagcttattgcatcctaccgcctgtagagctggcctcctccagctgagccgaaatgctttccaccctcctcacattcatgtctagggacgcagggtgcagaagcgagactcgagagtccaccggccaggggcgtctgtccacgggtctgcacgggagcgcaccgccgctcggcccgggggcgtccgtggcgctgggagcgagagcttcggcggcggctgcgggcagggcgcgcggagcgggctgcaggtgcgggcggaggccggcggggggcgccgggggcgctgcgcggcccttggcggcgggggcgcgcggggtggcgggggaggccgaggcgccggcagcttcgcgccggcggctggaagcgggcgggctgcacgggcggctcgagtgcggggaccccagcccctcgccctcgtgagcgccgcccctg

SEQ ID NO: 5078 - DNA, 600 bp, Homo sapiens
aaggagagaagtggtcggtgtctgtttccttctgtcccccggggccgtggagctgtcggagggaaggaggacggtgcggggccgcagggggcgcggggcgcggcgggacccaggctacgagcgggagggaggcgggagtcgggggaagacgcggcaggccggccgagggcaccccgaggaacatggcatggcctctgtgcgatccgagtcgcggtctccggggtgcctgggagggccgaaccactggtgagggcgtggggagcagggggtggcagagggcacccgggcggtagtccgggacgcgcaaggcagagccctgacgctccgggtccccgtgcctggctcttcttgcctcgccaccgcgtgctcctgggcgcgccccgccgcgggcccttgaggcgcgcggagacaccagcgctggcttcccgggcccgcgggccggggagggaagcctcggggctgcggggtgagaggaagaaagcaaacccggggagcaggcggctgccgcacccgcgcaccccgggccctcaccacgccctccccgcgcgccggctcaggggctgccccggaatcagctccccggggccgccgcaacgaagg

SEQ ID NO: 5079 - DNA, 600 bp, Homo sapiens
cttcggccagggatcccagggaggcccccaggccggaggccggggctcaggctctgcgcgccggcccagccactactgcgccgcggcgggcggagcgggcggggggcgcggcgcgcaggctcggcccggtgggggtcccggcgagcgggagggcggttggggaccccggccgcgccgggcgcggggctcgggattcgggagaccgcgcggcgccgaagccacgcgtcagccccactgtcccgcgcgcctcgccccaggcctcgggctcttcctccgcacctcgtaaagccgagaccccctcgcagtcccccactccgagaggcggaaaagttacctgggatcagcagggagcccgggcgcgccgcggcgtggggactaggctcgggcgcgcgtcctcggcggcggtgcgcaggagactcgggcgtggggaggaagccgcagcccagggctgctcgccgctgttccccccgccccctgttgcaggagacaccgaggctccgcggagctgcggcgggggcccacgcccagagaccgtgcgaggaaagccaacctcgtcctgcctgccctcccagccgcgggggagggggccaccgcagtact

SEQ ID NO: 5080 - DNA, 600 bp, Homo sapiens
agaccccctcgcagtcccccactccgagaggcggaaaagttacctgggatcagcagggagcccgggcgcgccgcggcgtggggactaggctcgggcgcgcgtcctcggcggcggtgcgcaggagactcgggcgtggggaggaagccgcagcccagggctgctcgccgctgttccccccgccccctgttgcaggagacaccgaggctccgcggagctgcggcgggggcccacgcccagagaccgtgcgaggaaagccaacctcgtcctgcctgccctcccagccgcgggggagggggccaccgcagtacttcaggacagttacatgggcacagcctcctccgtcctggcgcagggtcaggctccgcggacgacgcctggagacagctgccaatgccaatagctttagccctttattcccacttagatgatggcctggcctctccagacccctctcccctcccagacatcccctgtgagaaaggagggagagggtgttcctgaccttcaggtgagttatttattggctagggactgcagtattttttttttctttttggaaagaaaataaaatcaagttggtggtgtcttcaagtcatgtta

SEQ ID NO: 5081 - DNA, 600 bp, Homo sapiens
ccgcgggcttgaaccctttccatctttcatctgtttacacacagccccaataccttttctctaattgctctccctttttaatttagttttatttttaaacagaccattagaccatggcttgtttctgggctgagcctcccgctggtgcagccctgcagatggtccgcttcagctactccgttaggaggcgggcagttttgtctgtgtcttactccttccgtccagggcattccgcagactcctgctcccttcttcctctccacttgctctcaatagagggcgcgctgggcgaagtaggggcgtggcaggagccccgctccgcggatccaggttgaaattcctccctcctggaatccgaccgtgagcatttctgagcggtggtgaggaggaggccaccaagacacctccctcccgctgtgcaaaggaacgcaggagcccggcgcaggtggtgggcttaccgcgcgcacgcctggctggagaggtgacgccgctgtctgccaacctttcccagcttttcccacgattggagccaagagaggtccccggggatctcagttgggcaattgtaagggaaggagctcaggacactgacttcaagat

SEQ ID NO: 5082 - DNA, 600 bp, Homo sapiens
ctgggttcccccgaggaaaaatacccacccgcgagggctcggcggcttttcgactcggcggggatgaactgtggcaacttcggcagcccccaccgcggtgcggaagtaaagagggcaacattggcgactgcggctcggaggggctggagcgcgtgaagccgtgggggcgccgtgcgcctcccgctctctcgtttcggccgcaggtcctgggactccgacttcggtgctccgggtgatagcggctgcggcgcctgcagtccagatcctcgcagttctgcgggcgaaggaggcgaacggaatcggcccccagtggggagcgcaacaagccacagtagccaaaccccgcgctcctgcccgggctcccagacgaacgcagccgcagcggggggccgggccccgagccccacgccgccgccgccgcgccagcggtggggggcgggctgggggcggggcggccggggctgccttcccgggcgcatatgcgagcgcagcacccggcgctgccgagccacctcccccgccgcccgctagcaagtttggcggctccaagccaggcgcgcctcaggatccaggctcatttgcttccacctagcttcggtg

SEQ ID NO: 5083 - DNA, 600 bp, Homo sapiens
tcagcagcctgctgaggagtggggacgaagagcagcctaaacttagggctcgggatatttcgatgccacccaaattgccgtcctaccccaacgaggcagggaaaggagcggagcgcgcgcgcgagctgagtgagtgcttacgtcgcagcgagatctgtgctgggataattagagaggagttgggctgagccgagtcctctttcagcagcagcagccggagccgccgccgcagcccggtggggcaaccctgactcggaccgctcgggagagccccaggagaggccagcgccgcgcagcagccgccccgctgcgcccacctccccggctgctcccggagggctcacaaaggcggtggccgcccgagtggccttctccatccaggcgttcgcgtcctcctccccaccttctctcccgaaggcgaaaatggcagggccaggcgagaacctgggacagcggtggccctagccctgcgatcctcacccctcctgctaggagaggctgcgggctgcccgcggacgatgtggccgcggctgctcccgagcgcatcttcggcccgggtccccgccgccacccctcttctctgctccttccatcccgccc

SEQ ID NO: 5084 - DNA, 600 bp, Homo sapiens
ccgcctcggtctgggttcccccgaggaaaaatacccacccgcgagggctcggcggcttttcgactcggcggggatgaactgtggcaacttcggcagcccccaccgcggtgcggaagtaaagagggcaacattggcgactgcggctcggaggggctggagcgcgtgaagccgtgggggcgccgtgcgcctcccgctctctcgtttcggccgcaggtcctgggactccgacttcggtgctccgggtgatagcggctgcggcgcctgcagtccagatcctcgcagttctgcgggcgaaggaggcgaacggaatcggcccccagtggggagcgcaacaagccacagtagccaaaccccgcgctcctgcccgggctcccagacgaacgcagccgcagcggggggccgggccccgagccccacgccgccgccgccgcgccagcggtggggggcgggctgggggcggggcggccggggctgccttcccgggcgcatatgcgagcgcagcacccggcgctgccgagccacctcccccgccgcccgctagcaagtttggcggctccaagccaggcgcgcctcaggatccaggctcatttgcttccacct

SEQ ID NO: 5085 - DNA, 600 bp, Homo sapiens
aaaatacccacccgcgagggctcggcggcttttcgactcggcggggatgaactgtggcaacttcggcagcccccaccgcggtgcggaagtaaagagggcaacattggcgactgcggctcggaggggctggagcgcgtgaagccgtgggggcgccgtgcgcctcccgctctctcgtttcggccgcaggtcctgggactccgacttcggtgctccgggtgatagcggctgcggcgcctgcagtccagatcctcgcagttctgcgggcgaaggaggcgaacggaatcggcccccagtggggagcgcaacaagccacagtagccaaaccccgcgctcctgcccgggctcccagacgaacgcagccgcagcggggggccgggccccgagccccacgccgccgccgccgcgccagcggtggggggcgggctgggggcggggcggccggggctgccttcccgggcgcatatgcgagcgcagcacccggcgctgccgagccacctcccccgccgcccgctagcaagtttggcggctccaagccaggcgcgcctcaggatccaggctcatttgcttccacctagcttcggtgccccctgctaggcgggg

SEQ ID NO: 5086 - DNA, 600 bp, Homo sapiens
ctcggtctgggttcccccgaggaaaaatacccacccgcgagggctcggcggcttttcgactcggcggggatgaactgtggcaacttcggcagcccccaccgcggtgcggaagtaaagagggcaacattggcgactgcggctcggaggggctggagcgcgtgaagccgtgggggcgccgtgcgcctcccgctctctcgtttcggccgcaggtcctgggactccgacttcggtgctccgggtgatagcggctgcggcgcctgcagtccagatcctcgcagttctgcgggcgaaggaggcgaacggaatcggcccccagtggggagcgcaacaagccacagtagccaaaccccgcgctcctgcccgggctcccagacgaacgcagccgcagcggggggccgggccccgagccccacgccgccgccgccgcgccagcggtggggggcgggctgggggcggggcggccggggctgccttcccgggcgcatatgcgagcgcagcacccggcgctgccgagccacctcccccgccgcccgctagcaagtttggcggctccaagccaggcgcgcctcaggatccaggctcatttgcttccacctagct

SEQ ID NO: 5087 - DNA, 600 bp, Homo sapiens
acctcgcgcaccagcagccggccagcggcggcagcagcccatgcctccggtgcaacagctgcgcctcctccggtgccccggcggcgggggcgggagataacctgtccctgctgctccgcacctcctcgcccggcggcgccttccggacccgcacctcctcgccgctgtcgggctcgtcctgctgctgctgctgctgctcgtcgcgccggggcagccagctcaatgtgagcgagctgacgccgtccagccatgccagtgcgctccggcagcagtacgcgcagcagtccgcgcagcagtcggcgtccgcctcccagtaccaccagtgccacagcctgcagcccgccgccagccccacgggcagcctcggcagtctgggctccgggcccccgctctcgcaccaccaccaccacccgcacccggcgcaccaccagcaccaccagccccaggcgcgccgcgagagcaaccccttcaccgaaatagccatgagcagctgcaggtacaacgggggcgtcatgcggccgctcagcaacttgagcgcgtcccgccggaacctgcacgagatggactcagaggcgcagcccctgcagccccccgcgtctg

SEQ ID NO: 5088 - DNA, 600 bp, Homo sapiens
actcgcgcgtctccggcgtgactgccgagattgacgtggaggacacgtcaaattgattcccgcacgctgcagcctcccggtcagacgaatttctcccaatcggatgaagttcaccctgggcctggggtcgcgggcgtggagagtgtcctgggagggggcagcagcggcggcggcaggccctggagcgggcggcagcgcgctccgctgccgcgcacagcgcgtctccagcccgcggctgggccgccgcggctctcggctctcgggcgccctccctctatgcctctcacgcggcggcggcggcgcccaagctctcccggactgcgccgggcccagccccggccaccccggccaccccggcgccaggcagctggccggcccgctcgctatgggtaaggggcgggcgacaggcagggctcgggagggctgatgaggtgggtcgggtccgcctgcctcccttccctctcgtccgctttccctgggcgacccagtcctgggtcctggagaagctgcattctcctctgatccccagccttcagggggcagttgagcaagtctgggaagggagtgttccaagtagacgcgctaaaagtcgcgaaaggg

SEQ ID NO: 5089 - DNA, 600 bp, Homo sapiens
tccgcttcagctactccgttaggaggcgggcagttttgtctgtgtcttactccttccgtccagggcattccgcagactcctgctcccttcttcctctccacttgctctcaatagagggcgcgctgggcgaagtaggggcgtggcaggagccccgctccgcggatccaggttgaaattcctccctcctggaatccgaccgtgagcatttctgagcggtggtgaggaggaggccaccaagacacctccctcccgctgtgcaaaggaacgcaggagcccggcgcaggtggtgggcttaccgcgcgcacgcctggctggagaggtgacgccgctgtctgccaacctttcccagcttttcccacgattggagccaagagaggtccccggggatctcagttgggcaattgtaagggaaggagctcaggacactgacttcaagatgaagggggaggtcagcgaagacagttctagggtgggcggcggccgctgacagagcaggagccacagccaccggggcttggagataggagcaagtcgcaggcggagggggctgcgggctggctgcctgggcagcacaggacttgagggagctgcggggactcc

SEQ ID NO: 5090 - DNA, 600 bp, Homo sapiens
tctgtgctgggataattagagaggagttgggctgagccgagtcctctttcagcagcagcagccggagccgccgccgcagcccggtggggcaaccctgactcggaccgctcgggagagccccaggagaggccagcgccgcgcagcagccgccccgctgcgcccacctccccggctgctcccggagggctcacaaaggcggtggccgcccgagtggccttctccatccaggcgttcgcgtcctcctccccaccttctctcccgaaggcgaaaatggcagggccaggcgagaacctgggacagcggtggccctagccctgcgatcctcacccctcctgctaggagaggctgcgggctgcccgcggacgatgtggccgcggctgctcccgagcgcatcttcggcccgggtccccgccgccacccctcttctctgctccttccatcccgcccagaggagttgatgccgctgtcgccgccgccgccgctgctgaagccgcggctgatggatgccagggagtgccgcattgcttagcgaccccgcctctgggtttgctggtaggagcggctgctctttcttctttcttgctttggggttttatagaa

SEQ ID NO: 5091 - DNA, 600 bp, Homo sapiens
agagaggagttgggctgagccgagtcctctttcagcagcagcagccggagccgccgccgcagcccggtggggcaaccctgactcggaccgctcgggagagccccaggagaggccagcgccgcgcagcagccgccccgctgcgcccacctccccggctgctcccggagggctcacaaaggcggtggccgcccgagtggccttctccatccaggcgttcgcgtcctcctccccaccttctctcccgaaggcgaaaatggcagggccaggcgagaacctgggacagcggtggccctagccctgcgatcctcacccctcctgctaggagaggctgcgggctgcccgcggacgatgtggccgcggctgctcccgagcgcatcttcggcccgggtccccgccgccacccctcttctctgctccttccatcccgcccagaggagttgatgccgctgtcgccgccgccgccgctgctgaagccgcggctgatggatgccagggagtgccgcattgcttagcgaccccgcctctgggtttgctggtaggagcggctgctctttcttctttcttgctttggggttttatagaaaagataaggacattttt

SEQ ID NO: 5092 - DNA, 600 bp, Homo sapiens
ctaccccaacgaggcagggaaaggagcggagcgcgcgcgcgagctgagtgagtgcttacgtcgcagcgagatctgtgctgggataattagagaggagttgggctgagccgagtcctctttcagcagcagcagccggagccgccgccgcagcccggtggggcaaccctgactcggaccgctcgggagagccccaggagaggccagcgccgcgcagcagccgccccgctgcgcccacctccccggctgctcccggagggctcacaaaggcggtggccgcccgagtggccttctccatccaggcgttcgcgtcctcctccccaccttctctcccgaaggcgaaaatggcagggccaggcgagaacctgggacagcggtggccctagccctgcgatcctcacccctcctgctaggagaggctgcgggctgcccgcggacgatgtggccgcggctgctcccgagcgcatcttcggcccgggtccccgccgccacccctcttctctgctccttccatcccgcccagaggagttgatgccgctgtcgccgccgccgccgctgctgaagccgcggctgatggatgccagggagtgccgcattgcttag

SEQ ID NO: 5093 - DNA, 600 bp, Homo sapiens
agggtgcagaagcgagactcgagagtccaccggccaggggcgtctgtccacgggtctgcacgggagcgcaccgccgctcggcccgggggcgtccgtggcgctgggagcgagagcttcggcggcggctgcgggcagggcgcgcggagcgggctgcaggtgcgggcggaggccggcggggggcgccgggggcgctgcgcggcccttggcggcgggggcgcgcggggtggcgggggaggccgaggcgccggcagcttcgcgccggcggctggaagcgggcgggctgcacgggcggctcgagtgcggggaccccagcccctcgccctcgtgagcgccgcccctgccacctgctgccaagtcaccggactggggatgcggggggcggggtgcggggagaggaaagcgccgcgggtggcacggtgcctctggcgacagagtagatggacccgaaagagacccgaggtgacttcgggctgggcaggacacccccgggagttgccagcggctctcagcgggcgcctctaggaccccttgtcactgcgagcagcgcctgctctggggaggggctcgaaggcgccgcgccttctcaacgcgccgctgcgt

SEQ ID NO: 5094 - DNA, 600 bp, Homo sapiens
ctcgagagtccaccggccaggggcgtctgtccacgggtctgcacgggagcgcaccgccgctcggcccgggggcgtccgtggcgctgggagcgagagcttcggcggcggctgcgggcagggcgcgcggagcgggctgcaggtgcgggcggaggccggcggggggcgccgggggcgctgcgcggcccttggcggcgggggcgcgcggggtggcgggggaggccgaggcgccggcagcttcgcgccggcggctggaagcgggcgggctgcacgggcggctcgagtgcggggaccccagcccctcgccctcgtgagcgccgcccctgccacctgctgccaagtcaccggactggggatgcggggggcggggtgcggggagaggaaagcgccgcgggtggcacggtgcctctggcgacagagtagatggacccgaaagagacccgaggtgacttcgggctgggcaggacacccccgggagttgccagcggctctcagcgggcgcctctaggaccccttgtcactgcgagcagcgcctgctctggggaggggctcgaaggcgccgcgccttctcaacgcgccgctgcgtcccccaggggctccaac

SEQ ID NO: 5095 - DNA, 600 bp, Homo sapiens
gcgcgcgggcgcggctctgggagcgggggaaggtgaggggaaatgggacatgatggcattaataatcgttaccaaagacggtgggagtaacaaaggaatgcgtctccgagacgccgcccagccccggggtgttttctggcgcggtcgcggtgcaggaacgcgagccccgccgccgagcctcccgccgcctgcgttcgttggcgcggcgcccggcggtagtgccaccccgaggccgagcgctgcccccgccggcccgcggctgccagccggccctgcccgcgcccgggccccgcgagcggccgcacttcaccttacggaggggagataatgagatcaattagaggcgccgtcaccgcgccggagacagctgccgccgcatagtaatcacccgcgggctgggtgcgcgggggctccccgctacctgcgcgcctgctgctcccaccacgcggcaccgacccgggcgcgcccccggcccctgtccgcagcccacagccacaccgcgcaccctacaccctccttgcgcctctgctggggagctcaccccctccactcgcacagtgcgctgcggcccggggtgtgggaggtcccgggacttggggt

SEQ ID NO: 5096 - DNA, 600 bp, Homo sapiens
gagatcgggcgcgcgggcgcggctctgggagcgggggaaggtgaggggaaatgggacatgatggcattaataatcgttaccaaagacggtgggagtaacaaaggaatgcgtctccgagacgccgcccagccccggggtgttttctggcgcggtcgcggtgcaggaacgcgagccccgccgccgagcctcccgccgcctgcgttcgttggcgcggcgcccggcggtagtgccaccccgaggccgagcgctgcccccgccggcccgcggctgccagccggccctgcccgcgcccgggccccgcgagcggccgcacttcaccttacggaggggagataatgagatcaattagaggcgccgtcaccgcgccggagacagctgccgccgcatagtaatcacccgcgggctgggtgcgcgggggctccccgctacctgcgcgcctgctgctcccaccacgcggcaccgacccgggcgcgcccccggcccctgtccgcagcccacagccacaccgcgcaccctacaccctccttgcgcctctgctggggagctcaccccctccactcgcacagtgcgctgcggcccggggtgtgggaggtcccggga

SEQ ID NO: 5097 - DNA, 600 bp, Homo sapiens
tgccggcctcggagtccgcggcgccggcggctagaggtccagaggcgaaccacttgctggtgcagaagagaaaccctcaaatccctggcctttcgcggagacgcctggacggggccgtgcgccgtggactgagcaggcgtctcggggagcacttctgcagagcgaggacttccatgtgagcgattccgttctccccaccaccaatccgacctcccagccgtctccgccgcccgagcatccttgaggtgggacgagcaggggcttggatccctgccggccgtctggtgtgtgaggcttgcacggcccctggctgccccgcgcctcgccggagcccgagggggcgcaggtccggggcgagggccggccgggctgtttgatggcttcactgagaagagtcaaagtgctgttggtgttgaacttgatcgcggtagccggcttcgtgctcttcctggccaagtgccggcccatcgcggtgcgcagcggagacgccttccacgagatccggccgcgcgccgaggtggccaacctcagcgcgcacagcgccagccccatccaggatgcggtcctgaagcgcctgtcgctgctggaggacatcgtgta

SEQ ID NO: 5098 - DNA, 600 bp, Homo sapiens
ttttgtgaaacgggctagctgtcagccgggattgatcacttgactgtgtcagttgcagacagggctggaagatatggctttaattttctttctttctttctttctttaaccacaaaacaaaacacaaaactgtttcctcaagccccttgtattggggcctattgcaggtgaagggggctgaccaaaggaaggaggtggcgctgatccagaggaggctgagtgaggggtggagcggagcccagccgagggagggaaggagaggaacgccggcccactagccgaccccagcgcaacccagcgcggttcccagacgctgccgggtaactgatgccgccggcacagcttctgttctcacttgtggagctttgtctcccctcgctgggcagcccctggtaccgcaacccgcctggccgccttcccggctgaggcccccgggcagagctcctccgcagggagcattcccgtggacaaacacccctttccctggtagctgtggcaacagttgatctgtggcagcggaccaggaggagggtcaaatgggagaagggacggccagctggtcctaccagagactgtcgctggcgtcctcaggggccgctg

SEQ ID NO: 5099 - DNA, 600 bp, Homo sapiens
gccccgccgccgagcctcccgccgcctgcgttcgttggcgcggcgcccggcggtagtgccaccccgaggccgagcgctgcccccgccggcccgcggctgccagccggccctgcccgcgcccgggccccgcgagcggccgcacttcaccttacggaggggagataatgagatcaattagaggcgccgtcaccgcgccggagacagctgccgccgcatagtaatcacccgcgggctgggtgcgcgggggctccccgctacctgcgcgcctgctgctcccaccacgcggcaccgacccgggcgcgcccccggcccctgtccgcagcccacagccacaccgcgcaccctacaccctccttgcgcctctgctggggagctcaccccctccactcgcacagtgcgctgcggcccggggtgtgggaggtcccgggacttggggtgtgagtgcctgtgtgggggtaggggcaggtgtccgcttgtgcgcatatgggcatgagtgtacatggcgtgtgcctggagatgggcgagtgcaggctggaatgtgccggcgtggcacgtgtgtgggcccaaatagatgcgtgtgtgatcacatgttgtgttcgt

SEQ ID NO: 5100 - DNA, 600 bp, Homo sapiens
ttcccaaaccccaaccacagctcgctccgcctcgaggaccccttttctgcacccccacctcagcgccctcttcctgcacccacaaagagagtactcagtcataggggttcaacaggagagaggagacagaaggtacaggcggtgagcagggactcagccatcatccccctcaggtccctccccacccagttgacagagcgaatcccgagtaattgttttccgagggggtccgtgcgcgctcggtggcgccgcctcggtctgggttcccccgaggaaaaatacccacccgcgagggctcggcggcttttcgactcggcggggatgaactgtggcaacttcggcagcccccaccgcggtgcggaagtaaagagggcaacattggcgactgcggctcggaggggctggagcgcgtgaagccgtgggggcgccgtgcgcctcccgctctctcgtttcggccgcaggtcctgggactccgacttcggtgctccgggtgatagcggctgcggcgcctgcagtccagatcctcgcagttctgcgggcgaaggaggcgaacggaatcggcccccagtggggagcgcaacaagccacagtagccaaacc

SEQ ID NO: 5101 - DNA, 600 bp, Homo sapiens
ggctgcggcgcctgcagtccagatcctcgcagttctgcgggcgaaggaggcgaacggaatcggcccccagtggggagcgcaacaagccacagtagccaaaccccgcgctcctgcccgggctcccagacgaacgcagccgcagcggggggccgggccccgagccccacgccgccgccgccgcgccagcggtggggggcgggctgggggcggggcggccggggctgccttcccgggcgcatatgcgagcgcagcacccggcgctgccgagccacctcccccgccgcccgctagcaagtttggcggctccaagccaggcgcgcctcaggatccaggctcatttgcttccacctagcttcggtgccccctgctaggcggggaccctcgagagcgatgccgatggatttgattttagttgtgtggttctgtgtgtgcactgccaggacaggtaagcatgactgtggcggttagagggatccgggaaatgggggtgcccacagaccacggcggcgtggggagacctggagccgagctttgcgctggtctggggaacggcggtagcgtggaccggttcctgggatctctttgccctgctcggagtga

SEQ ID NO: 5102 - DNA, 600 bp, Homo sapiens
tggagatcgggcgcgcgggcgcggctctgggagcgggggaaggtgaggggaaatgggacatgatggcattaataatcgttaccaaagacggtgggagtaacaaaggaatgcgtctccgagacgccgcccagccccggggtgttttctggcgcggtcgcggtgcaggaacgcgagccccgccgccgagcctcccgccgcctgcgttcgttggcgcggcgcccggcggtagtgccaccccgaggccgagcgctgcccccgccggcccgcggctgccagccggccctgcccgcgcccgggccccgcgagcggccgcacttcaccttacggaggggagataatgagatcaattagaggcgccgtcaccgcgccggagacagctgccgccgcatagtaatcacccgcgggctgggtgcgcgggggctccccgctacctgcgcgcctgctgctcccaccacgcggcaccgacccgggcgcgcccccggcccctgtccgcagcccacagccacaccgcgcaccctacaccctccttgcgcctctgctggggagctcaccccctccactcgcacagtgcgctgcggcccggggtgtgggaggtcccgg

SEQ ID NO: 5103 - DNA, 600 bp, Homo sapiens
cggtgctccgggtgatagcggctgcggcgcctgcagtccagatcctcgcagttctgcgggcgaaggaggcgaacggaatcggcccccagtggggagcgcaacaagccacagtagccaaaccccgcgctcctgcccgggctcccagacgaacgcagccgcagcggggggccgggccccgagccccacgccgccgccgccgcgccagcggtggggggcgggctgggggcggggcggccggggctgccttcccgggcgcatatgcgagcgcagcacccggcgctgccgagccacctcccccgccgcccgctagcaagtttggcggctccaagccaggcgcgcctcaggatccaggctcatttgcttccacctagcttcggtgccccctgctaggcggggaccctcgagagcgatgccgatggatttgattttagttgtgtggttctgtgtgtgcactgccaggacaggtaagcatgactgtggcggttagagggatccgggaaatgggggtgcccacagaccacggcggcgtggggagacctggagccgagctttgcgctggtctggggaacggcggtagcgtggaccggttcctgggatctc

SEQ ID NO: 5104 - DNA, 600 bp, Homo sapiens
gggctagctgtcagccgggattgatcacttgactgtgtcagttgcagacagggctggaagatatggctttaattttctttctttctttctttctttaaccacaaaacaaaacacaaaactgtttcctcaagccccttgtattggggcctattgcaggtgaagggggctgaccaaaggaaggaggtggcgctgatccagaggaggctgagtgaggggtggagcggagcccagccgagggagggaaggagaggaacgccggcccactagccgaccccagcgcaacccagcgcggttcccagacgctgccgggtaactgatgccgccggcacagcttctgttctcacttgtggagctttgtctcccctcgctgggcagcccctggtaccgcaacccgcctggccgccttcccggctgaggcccccgggcagagctcctccgcagggagcattcccgtggacaaacacccctttccctggtagctgtggcaacagttgatctgtggcagcggaccaggaggagggtcaaatgggagaagggacggccagctggtcctaccagagactgtcgctggcgtcctcaggggccgctgcagggccacct

SEQ ID NO: 5105 - DNA, 598 bp, Homo sapiens
tttctttctttaaccacaaaacaaaacacaaaactgtttcctcaagccccttgtattggggcctattgcaggtgaagggggctgaccaaaggaaggaggtggcgctgatccagaggaggctgagtgaggggtggagcggagcccagccgagggagggaaggagaggaacgccggcccactagccgaccccagcgcaacccagcgcggttcccagacgctgccgggtaactgatgccgccggcacagcttctgttctcacttgtggagctttgtctcccctcgctgggcagcccctggtaccgcaacccgcctggccgccttcccggctgaggcccccgggcagagctcctccgcagggagcattcccgtggacaaacacccctttccctggtagctgtggcaacagttgatctgtggcagcggaccaggaggagggtcaaatgggagaagggacggccagctggtcctaccagagactgtcgctggcgtcctcaggggccgctgcagggccaccttgtgtgcttgccctttccccacggtagactgccccgggagggggactgtgctgcctgaattcttgtccgggtgggactggcct

SEQ ID NO: 5106 - DNA, 600 bp, Homo sapiens
acagaaggtacaggcggtgagcagggactcagccatcatccccctcaggtccctccccacccagttgacagagcgaatcccgagtaattgttttccgagggggtccgtgcgcgctcggtggcgccgcctcggtctgggttcccccgaggaaaaatacccacccgcgagggctcggcggcttttcgactcggcggggatgaactgtggcaacttcggcagcccccaccgcggtgcggaagtaaagagggcaacattggcgactgcggctcggaggggctggagcgcgtgaagccgtgggggcgccgtgcgcctcccgctctctcgtttcggccgcaggtcctgggactccgacttcggtgctccgggtgatagcggctgcggcgcctgcagtccagatcctcgcagttctgcgggcgaaggaggcgaacggaatcggcccccagtggggagcgcaacaagccacagtagccaaaccccgcgctcctgcccgggctcccagacgaacgcagccgcagcggggggccgggccccgagccccacgccgccgccgccgcgccagcggtggggggcgggctgggggcggggcggccggggctgcct

SEQ ID NO: 5107 - DNA, 600 bp, Homo sapiens
ccccttttctgcacccccacctcagcgccctcttcctgcacccacaaagagagtactcagtcataggggttcaacaggagagaggagacagaaggtacaggcggtgagcagggactcagccatcatccccctcaggtccctccccacccagttgacagagcgaatcccgagtaattgttttccgagggggtccgtgcgcgctcggtggcgccgcctcggtctgggttcccccgaggaaaaatacccacccgcgagggctcggcggcttttcgactcggcggggatgaactgtggcaacttcggcagcccccaccgcggtgcggaagtaaagagggcaacattggcgactgcggctcggaggggctggagcgcgtgaagccgtgggggcgccgtgcgcctcccgctctctcgtttcggccgcaggtcctgggactccgacttcggtgctccgggtgatagcggctgcggcgcctgcagtccagatcctcgcagttctgcgggcgaaggaggcgaacggaatcggcccccagtggggagcgcaacaagccacagtagccaaaccccgcgctcctgcccgggctcccagacgaacgcagccgc

SEQ ID NO: 5108 - DNA, 600 bp, Homo sapiens
cggggctcggggctttggtacagaggagcagcagaagccgccgccgcagacgcccggatgcggaggacccagagcgctgcgcagctgaggagcacctggggagccaccgccggcgccaacttttgccatcccgggagccatagcggcagagagggggtcccggacccgaggtggcagcgaggggctctgctttggcagctgtcggggctggagctcaggaccccaactccagccaagtcgggccgcggcggggcaggcgtaggctgcgcaggcaggggtggccgcgggtgctgagccagtcgccgccgcgcaggcgggcgctggagtctcagctacctggcgcgaccgccagcagcacccagcgcggggccgggagctgctgggggcccaggctccgctctccccaccgctctgcaccgctgccggctgcggacagacccgatgcgccaccaccaccgcagttgccacgacccccatggaatcgctggcgcctccgctccggttctctaacccggcgcactctgggatcccaaagcttgccgtgggttggaggcttcctactctttgtgcgttgaggctttgacctgacccagagcgcag

SEQ ID NO: 5109 - DNA, 600 bp, Homo sapiens
atctctatctccatcatctccatctccatcatctccatcatctccatctccatctcctactccatcatctccatctccatcttctccatcatctccatcttctccatcatctccatcttctccatcatctccatcttcatcatctccatttccatcatctccatctccatcatcatctctatctccatcatctccatctccatcatctccatcatctccatctccatctccatctccatcatctaccgtctccaatctccatctccgaagttatgcccacttcctcgaagtttggagccacgcgaactacactgcccagaaggcgccgcgccgtgagccgcgatgcttggccaatgaaaagaggtctacccgagagtgcgacgcgcaatgggcgggacttccggcgtctcccctcggcggttgctttcgctgccctcaagagaactcagcttgccggaagctggttgttcgctgcggcgaccagctccggaaagcgcggtggggacgcgctgtgttctcgcagctcagaggcgggtctgaggctcggtggcggcgcccagggtggcccgggccctttcctcggtcgttgtctcaccgcca

SEQ ID NO: 5110 - DNA, 600 bp, Homo sapiens
tctccatcttcatcatctccatttccatcatctccatctccatcatcatctctatctccatcatctccatctccatcatctccatcatctccatctccatctccatctccatcatctaccgtctccaatctccatctccgaagttatgcccacttcctcgaagtttggagccacgcgaactacactgcccagaaggcgccgcgccgtgagccgcgatgcttggccaatgaaaagaggtctacccgagagtgcgacgcgcaatgggcgggacttccggcgtctcccctcggcggttgctttcgctgccctcaagagaactcagcttgccggaagctggttgttcgctgcggcgaccagctccggaaagcgcggtggggacgcgctgtgttctcgcagctcagaggcgggtctgaggctcggtggcggcgcccagggtggcccgggccctttcctcggtcgttgtctcaccgccacaggctccgatggcggcggccacgctgagggaccccgctcaggtgagcgccgcgtcctcccggcctcccccgaatcctaaagccctgtgagggccgcctgctcaggtccccgggtgcagaactgtgg

SEQ ID NO: 5111 - DNA, 600 bp, Homo sapiens
aagagaaaccctcaaatccctggcctttcgcggagacgcctggacggggccgtgcgccgtggactgagcaggcgtctcggggagcacttctgcagagcgaggacttccatgtgagcgattccgttctccccaccaccaatccgacctcccagccgtctccgccgcccgagcatccttgaggtgggacgagcaggggcttggatccctgccggccgtctggtgtgtgaggcttgcacggcccctggctgccccgcgcctcgccggagcccgagggggcgcaggtccggggcgagggccggccgggctgtttgatggcttcactgagaagagtcaaagtgctgttggtgttgaacttgatcgcggtagccggcttcgtgctcttcctggccaagtgccggcccatcgcggtgcgcagcggagacgccttccacgagatccggccgcgcgccgaggtggccaacctcagcgcgcacagcgccagccccatccaggatgcggtcctgaagcgcctgtcgctgctggaggacatcgtgtaccggcagctgaatggtaaggacgcacgccggcgcctccggggctcgacgcgggcgggccgggcac

SEQ ID NO: 5112 - DNA, 600 bp, Homo sapiens
tcatcatctctatctccatcatctccatctccatcatctccatcatctccatctccatctccatctccatcatctaccgtctccaatctccatctccgaagttatgcccacttcctcgaagtttggagccacgcgaactacactgcccagaaggcgccgcgccgtgagccgcgatgcttggccaatgaaaagaggtctacccgagagtgcgacgcgcaatgggcgggacttccggcgtctcccctcggcggttgctttcgctgccctcaagagaactcagcttgccggaagctggttgttcgctgcggcgaccagctccggaaagcgcggtggggacgcgctgtgttctcgcagctcagaggcgggtctgaggctcggtggcggcgcccagggtggcccgggccctttcctcggtcgttgtctcaccgccacaggctccgatggcggcggccacgctgagggaccccgctcaggtgagcgccgcgtcctcccggcctcccccgaatcctaaagccctgtgagggccgcctgctcaggtccccgggtgcagaactgtggggcgttcgtgggcggcgtcccgtttctgacacgcagtgtgat

SEQ ID NO: 5113 - DNA, 600 bp, Homo sapiens
gcagaagagaaaccctcaaatccctggcctttcgcggagacgcctggacggggccgtgcgccgtggactgagcaggcgtctcggggagcacttctgcagagcgaggacttccatgtgagcgattccgttctccccaccaccaatccgacctcccagccgtctccgccgcccgagcatccttgaggtgggacgagcaggggcttggatccctgccggccgtctggtgtgtgaggcttgcacggcccctggctgccccgcgcctcgccggagcccgagggggcgcaggtccggggcgagggccggccgggctgtttgatggcttcactgagaagagtcaaagtgctgttggtgttgaacttgatcgcggtagccggcttcgtgctcttcctggccaagtgccggcccatcgcggtgcgcagcggagacgccttccacgagatccggccgcgcgccgaggtggccaacctcagcgcgcacagcgccagccccatccaggatgcggtcctgaagcgcctgtcgctgctggaggacatcgtgtaccggcagctgaatggtaaggacgcacgccggcgcctccggggctcgacgcgggcgggccgg

SEQ ID NO: 5114 - DNA, 600 bp, Homo sapiens
tctccatcatctccatctccatctccatctccatcatctaccgtctccaatctccatctccgaagttatgcccacttcctcgaagtttggagccacgcgaactacactgcccagaaggcgccgcgccgtgagccgcgatgcttggccaatgaaaagaggtctacccgagagtgcgacgcgcaatgggcgggacttccggcgtctcccctcggcggttgctttcgctgccctcaagagaactcagcttgccggaagctggttgttcgctgcggcgaccagctccggaaagcgcggtggggacgcgctgtgttctcgcagctcagaggcgggtctgaggctcggtggcggcgcccagggtggcccgggccctttcctcggtcgttgtctcaccgccacaggctccgatggcggcggccacgctgagggaccccgctcaggtgagcgccgcgtcctcccggcctcccccgaatcctaaagccctgtgagggccgcctgctcaggtccccgggtgcagaactgtggggcgttcgtgggcggcgtcccgtttctgacacgcagtgtgatggggtggcaatggagggcaaggggcccggctcgcaa

SEQ ID NO: 5115 - DNA, 600 bp, Homo sapiens
tctcgtttcggccgcaggtcctgggactccgacttcggtgctccgggtgatagcggctgcggcgcctgcagtccagatcctcgcagttctgcgggcgaaggaggcgaacggaatcggcccccagtggggagcgcaacaagccacagtagccaaaccccgcgctcctgcccgggctcccagacgaacgcagccgcagcggggggccgggccccgagccccacgccgccgccgccgcgccagcggtggggggcgggctgggggcggggcggccggggctgccttcccgggcgcatatgcgagcgcagcacccggcgctgccgagccacctcccccgccgcccgctagcaagtttggcggctccaagccaggcgcgcctcaggatccaggctcatttgcttccacctagcttcggtgccccctgctaggcggggaccctcgagagcgatgccgatggatttgattttagttgtgtggttctgtgtgtgcactgccaggacaggtaagcatgactgtggcggttagagggatccgggaaatgggggtgcccacagaccacggcggcgtggggagacctggagccgagctttgcgctggtctggg

SEQ ID NO: 5116 - DNA, 600 bp, Homo sapiens
gcgctgcttttccgcgctcagtgatccagttaggagctctccccgcagcagctgcgcgggactttgcattccagatgtccccagccctccaggctaaagcagcggccacctgaagttgaggaatggggcgtgacgaccaccaggtcccgcagtgaccacgggagggtggggagaaggagtccagctccgccttgagcgtcgggtccctgggcaggaccctccgggccacgggccgctgtccgttgggcacccgggcaggagtctgcgaacgctgagtttctctggaaaggcgcggacccccggaggagccgtcccagccgcctggggagacgccccctcctctcccggtcttctttcccgggcacaccctccctagcccgggcgggggggttctccatctgccgcccctcccggcgggcaggcgaactctctcctaccgcaccctcaatctgtccgcggtcgcggggctcggcgggggcggggcccgggcgggggcgggggcggggccgggggcggggcgggccggcggctgcggaggctgcggaggctgcgggagaaaagttgtcccggccggagcgcgagcagcggcggagccggagc

SEQ ID NO: 5117 - DNA, 600 bp, Homo sapiens
aggggcacagcctggagcttgctactctctaggatctgttgtcaaagcagtttgcaaaaacagtcaggcaaaaccttgaggcgtacgtacgttatcacccacggatatcgcgaaagacacagcttagcccagagcctatgctaagaaccctcatccaccatctgaggggcaggaggcgcgcaaggtgtccgaaggggcatgggaattcctataagaaacggtcccttctggatagtcggaacatagaggaaaacgggggtgggttaggggaacacttactcttgtggggccctgcgctggcgaatgtcaagcctccaggttcacaaatggctggaggtgctcggggttagctcccgagggcggcaagcgccgaccggtcctcgctcgctaggcaggcgcctccggattccgttcatgcctctcggagctacagggcttggtgcggagacgcagggcgggcgcgctgggctctgggtgtccgcaacccaaagtgcagctggtgtcttgacgctaccgtctatgcacaagccggcggcggcggcggagcttggaggaggcagggagattccaaataaatccactaattctgggctgagcgct

SEQ ID NO: 5118 - DNA, 600 bp, Homo sapiens
actaatcaatttgagatgacttccccctcattcccaaagctagaggaggaagggggctgaaaggggctcagagcagtggaaggtcccaggcccagctggggttgggacgtgtgtgtgtgtgtgtgtgtgtgtgtgtgtgtgtgtgtgtgtgtagaggggtgggttccgggggggtggtggaagagggccgaggggggaggatagaaggagggggtagagtttcagggcggggaggggggcgctggggcgcagtgacgggaaccaatgagctgccaactcgcgcgtctccggcgtgactgccgagattgacgtggaggacacgtcaaattgattcccgcacgctgcagcctcccggtcagacgaatttctcccaatcggatgaagttcaccctgggcctggggtcgcgggcgtggagagtgtcctgggagggggcagcagcggcggcggcaggccctggagcgggcggcagcgcgctccgctgccgcgcacagcgcgtctccagcccgcggctgggccgccgcggctctcggctctcgggcgccctccctctatgcctctcacgcggcggcggcggcgcccaagctctcccggactgcgcc

SEQ ID NO: 5119 - DNA, 600 bp, Homo sapiens
ttccccctcattcccaaagctagaggaggaagggggctgaaaggggctcagagcagtggaaggtcccaggcccagctggggttgggacgtgtgtgtgtgtgtgtgtgtgtgtgtgtgtgtgtgtgtgtgtgtagaggggtgggttccgggggggtggtggaagagggccgaggggggaggatagaaggagggggtagagtttcagggcggggaggggggcgctggggcgcagtgacgggaaccaatgagctgccaactcgcgcgtctccggcgtgactgccgagattgacgtggaggacacgtcaaattgattcccgcacgctgcagcctcccggtcagacgaatttctcccaatcggatgaagttcaccctgggcctggggtcgcgggcgtggagagtgtcctgggagggggcagcagcggcggcggcaggccctggagcgggcggcagcgcgctccgctgccgcgcacagcgcgtctccagcccgcggctgggccgccgcggctctcggctctcgggcgccctccctctatgcctctcacgcggcggcggcggcgcccaagctctcccggactgcgccgggcccagccccggccaccc

SEQ ID NO: 5120 - DNA, 600 bp, Homo sapiens
tttgagatgacttccccctcattcccaaagctagaggaggaagggggctgaaaggggctcagagcagtggaaggtcccaggcccagctggggttgggacgtgtgtgtgtgtgtgtgtgtgtgtgtgtgtgtgtgtgtgtgtgtagaggggtgggttccgggggggtggtggaagagggccgaggggggaggatagaaggagggggtagagtttcagggcggggaggggggcgctggggcgcagtgacgggaaccaatgagctgccaactcgcgcgtctccggcgtgactgccgagattgacgtggaggacacgtcaaattgattcccgcacgctgcagcctcccggtcagacgaatttctcccaatcggatgaagttcaccctgggcctggggtcgcgggcgtggagagtgtcctgggagggggcagcagcggcggcggcaggccctggagcgggcggcagcgcgctccgctgccgcgcacagcgcgtctccagcccgcggctgggccgccgcggctctcggctctcgggcgccctccctctatgcctctcacgcggcggcggcggcgcccaagctctcccggactgcgccgggcccagc

SEQ ID NO: 5121 - DNA, 598 bp, Homo sapiens
tactaacacactaatcaatttgagatgacttccccctcattcccaaagctagaggaggaagggggctgaaaggggctcagagcagtggaaggtcccaggcccagctggggttgggacgtgtgtgtgtgtgtgtgtgtgtgtgtgtgtgtgtgtgtgtgtgtagaggggtgggttccgggggggtggtggaagagggccgaggggggaggatagaaggagggggtagagtttcagggcggggaggggggcgctggggcgcagtgacgggaaccaatgagctgccaactcgcgcgtctccggcgtgactgccgagattgacgtggaggacacgtcaaattgattcccgcacgctgcagcctcccggtcagacgaatttctcccaatcggatgaagttcaccctgggcctggggtcgcgggcgtggagagtgtcctgggagggggcagcagcggcggcggcaggccctggagcgggcggcagcgcgctccgctgccgcgcacagcgcgtctccagcccgcggctgggccgccgcggctctcggctctcgggcgccctccctctatgcctctcacgcggcggcggcggcgcccaagctctcc

SEQ ID NO: 5122 - DNA, 600 bp, Homo sapiens
gcgagcctttacctgccaggctgcccggcctctggagggtggccgtggcatacagctcctgcgagtgcttgctgtactgctcggacgcgtggaccaggcgcttggtgggcgacagggtggcgtacgtgccgatggtggagctcagctggtggatgggcgaggaggagatggtggactgcacggtggggggcgaggtcacgcggatcggggacaggccggccgaggacacgacgatgttgatgggcgagctggtgctgtaggacttggccaggcggctgggcgactgcttgggcgaggagccgcgcggcgcggcgtaggtggcgccctcgggggccgagccgccgcgctgcagcttggtgggcgaaccgccctggggcgcggccagcggggagcccccgcgcggcggcgcgggcagcgtggagctggagtagtagagcgcggcggcggcggcggcgggcggcgcgtcgggcaggtggaaggcgctgcccaggctgggcgcgaacggctcccgcggcggcggcggcggcggcggcgcgggctcgggccccgccaggtggccggcgcggctggtcgtgccctgtgcccgggagaggagagaac

SEQ ID NO: 5123 - DNA, 600 bp, Homo sapiens
aaacgagtactagtactaacacactaatcaatttgagatgacttccccctcattcccaaagctagaggaggaagggggctgaaaggggctcagagcagtggaaggtcccaggcccagctggggttgggacgtgtgtgtgtgtgtgtgtgtgtgtgtgtgtgtgtgtgtgtgtgtagaggggtgggttccgggggggtggtggaagagggccgaggggggaggatagaaggagggggtagagtttcagggcggggaggggggcgctggggcgcagtgacgggaaccaatgagctgccaactcgcgcgtctccggcgtgactgccgagattgacgtggaggacacgtcaaattgattcccgcacgctgcagcctcccggtcagacgaatttctcccaatcggatgaagttcaccctgggcctggggtcgcgggcgtggagagtgtcctgggagggggcagcagcggcggcggcaggccctggagcgggcggcagcgcgctccgctgccgcgcacagcgcgtctccagcccgcggctgggccgccgcggctctcggctctcgggcgccctccctctatgcctctcacgcggcggcggcggcgc

SEQ ID NO: 5124 - DNA, 600 bp, Homo sapiens
gggacgtgtgtgtgtgtgtgtgtgtgtgtgtgtgtgtgtgtgtgtgtgtagaggggtgggttccgggggggtggtggaagagggccgaggggggaggatagaaggagggggtagagtttcagggcggggaggggggcgctggggcgcagtgacgggaaccaatgagctgccaactcgcgcgtctccggcgtgactgccgagattgacgtggaggacacgtcaaattgattcccgcacgctgcagcctcccggtcagacgaatttctcccaatcggatgaagttcaccctgggcctggggtcgcgggcgtggagagtgtcctgggagggggcagcagcggcggcggcaggccctggagcgggcggcagcgcgctccgctgccgcgcacagcgcgtctccagcccgcggctgggccgccgcggctctcggctctcgggcgccctccctctatgcctctcacgcggcggcggcggcgcccaagctctcccggactgcgccgggcccagccccggccaccccggccaccccggcgccaggcagctggccggcccgctcgctatgggtaaggggcgggcgacaggcagggctcgggagggctgat

SEQ ID NO: 5125 - DNA, 600 bp, Homo sapiens
aaagctagaggaggaagggggctgaaaggggctcagagcagtggaaggtcccaggcccagctggggttgggacgtgtgtgtgtgtgtgtgtgtgtgtgtgtgtgtgtgtgtgtgtgtagaggggtgggttccgggggggtggtggaagagggccgaggggggaggatagaaggagggggtagagtttcagggcggggaggggggcgctggggcgcagtgacgggaaccaatgagctgccaactcgcgcgtctccggcgtgactgccgagattgacgtggaggacacgtcaaattgattcccgcacgctgcagcctcccggtcagacgaatttctcccaatcggatgaagttcaccctgggcctggggtcgcgggcgtggagagtgtcctgggagggggcagcagcggcggcggcaggccctggagcgggcggcagcgcgctccgctgccgcgcacagcgcgtctccagcccgcggctgggccgccgcggctctcggctctcgggcgccctccctctatgcctctcacgcggcggcggcggcgcccaagctctcccggactgcgccgggcccagccccggccaccccggccaccccggcgc

SEQ ID NO: 5126 - DNA, 600 bp, Homo sapiens
gagcctttacctgccaggctgcccggcctctggagggtggccgtggcatacagctcctgcgagtgcttgctgtactgctcggacgcgtggaccaggcgcttggtgggcgacagggtggcgtacgtgccgatggtggagctcagctggtggatgggcgaggaggagatggtggactgcacggtggggggcgaggtcacgcggatcggggacaggccggccgaggacacgacgatgttgatgggcgagctggtgctgtaggacttggccaggcggctgggcgactgcttgggcgaggagccgcgcggcgcggcgtaggtggcgccctcgggggccgagccgccgcgctgcagcttggtgggcgaaccgccctggggcgcggccagcggggagcccccgcgcggcggcgcgggcagcgtggagctggagtagtagagcgcggcggcggcggcggcgggcggcgcgtcgggcaggtggaaggcgctgcccaggctgggcgcgaacggctcccgcggcggcggcggcggcggcggcgcgggctcgggccccgccaggtggccggcgcggctggtcgtgccctgtgcccgggagaggagagaacac

SEQ ID NO: 5127 - DNA, 600 bp, Homo sapiens
acgagtactagtactaacacactaatcaatttgagatgacttccccctcattcccaaagctagaggaggaagggggctgaaaggggctcagagcagtggaaggtcccaggcccagctggggttgggacgtgtgtgtgtgtgtgtgtgtgtgtgtgtgtgtgtgtgtgtgtgtagaggggtgggttccgggggggtggtggaagagggccgaggggggaggatagaaggagggggtagagtttcagggcggggaggggggcgctggggcgcagtgacgggaaccaatgagctgccaactcgcgcgtctccggcgtgactgccgagattgacgtggaggacacgtcaaattgattcccgcacgctgcagcctcccggtcagacgaatttctcccaatcggatgaagttcaccctgggcctggggtcgcgggcgtggagagtgtcctgggagggggcagcagcggcggcggcaggccctggagcgggcggcagcgcgctccgctgccgcgcacagcgcgtctccagcccgcggctgggccgccgcggctctcggctctcgggcgccctccctctatgcctctcacgcggcggcggcggcgccc

SEQ ID NO: 5128 - DNA, 600 bp, Homo sapiens
ggtcctggagcatcccctccgcgtccttcctccctctggggctggggacagccgggatgtcccaggctgaggtggccaccagccgagcgcggctgctaggacgctggcgtggggagcgcggcgcggaactacggacagtgagccctggcgctcgctgccctgcgccttaatttgctggcggcggcgatcccggaggcccgcagccagtcagcgccgtctcacgtcaccgcttcctgattccgccgccgggggcggggccgcgggccgggcgcggagggcgcgcccagggtgcggcgcccgcgtggcctgtcgccccggctgttcggtaccccagcacaggttcagggaaaagggtgccaccactaggctgacgcagcagccatggacatccccacctggtctcacagccccgggcgggagggcggtgcgcgctgtcgggagaggacacatcaccgcggcctaacgcccgagatccgggcatggcccagttggggaagctatgaccagaccagtggaagcctcgggagttctcgctttttccattctttttcttacctgcgctcaaagttccaaaagaaagtagggaagcgctcagtagaa

SEQ ID NO: 5129 - DNA, 600 bp, Homo sapiens
tccttcctccctctggggctggggacagccgggatgtcccaggctgaggtggccaccagccgagcgcggctgctaggacgctggcgtggggagcgcggcgcggaactacggacagtgagccctggcgctcgctgccctgcgccttaatttgctggcggcggcgatcccggaggcccgcagccagtcagcgccgtctcacgtcaccgcttcctgattccgccgccgggggcggggccgcgggccgggcgcggagggcgcgcccagggtgcggcgcccgcgtggcctgtcgccccggctgttcggtaccccagcacaggttcagggaaaagggtgccaccactaggctgacgcagcagccatggacatccccacctggtctcacagccccgggcgggagggcggtgcgcgctgtcgggagaggacacatcaccgcggcctaacgcccgagatccgggcatggcccagttggggaagctatgaccagaccagtggaagcctcgggagttctcgctttttccattctttttcttacctgcgctcaaagttccaaaagaaagtagggaagcgctcagtagaatccggcgcctctgagccggcgcc

SEQ ID NO: 5130 - DNA, 600 bp, Homo sapiens
aaaccagccatagaccactcgggccccctcgcctccttttttccctggcttgcaccctccgcacagcgggctgcaggtgcttcccattcaccgcacggaccccgcagtgaaggcgcgcggctgcagccgcgcctgcctgcgttgggaagcggcgaaatagccaagtcgccgcagggaaggaaaccggcaggaaaactggaggggcacagcctggagcttgctactctctaggatctgttgtcaaagcagtttgcaaaaacagtcaggcaaaaccttgaggcgtacgtacgttatcacccacggatatcgcgaaagacacagcttagcccagagcctatgctaagaaccctcatccaccatctgaggggcaggaggcgcgcaaggtgtccgaaggggcatgggaattcctataagaaacggtcccttctggatagtcggaacatagaggaaaacgggggtgggttaggggaacacttactcttgtggggccctgcgctggcgaatgtcaagcctccaggttcacaaatggctggaggtgctcggggttagctcccgagggcggcaagcgccgaccggtcctcgctcgctaggcaggcgcct

SEQ ID NO: 5131 - DNA, 600 bp, Homo sapiens
cctccgcgtccttcctccctctggggctggggacagccgggatgtcccaggctgaggtggccaccagccgagcgcggctgctaggacgctggcgtggggagcgcggcgcggaactacggacagtgagccctggcgctcgctgccctgcgccttaatttgctggcggcggcgatcccggaggcccgcagccagtcagcgccgtctcacgtcaccgcttcctgattccgccgccgggggcggggccgcgggccgggcgcggagggcgcgcccagggtgcggcgcccgcgtggcctgtcgccccggctgttcggtaccccagcacaggttcagggaaaagggtgccaccactaggctgacgcagcagccatggacatccccacctggtctcacagccccgggcgggagggcggtgcgcgctgtcgggagaggacacatcaccgcggcctaacgcccgagatccgggcatggcccagttggggaagctatgaccagaccagtggaagcctcgggagttctcgctttttccattctttttcttacctgcgctcaaagttccaaaagaaagtagggaagcgctcagtagaatccggcgcctctgag

SEQ ID NO: 5132 - DNA, 600 bp, Homo sapiens
gtagagaataattattgtaccagggcccgccgaggcacgaggcactctattttgttttgtaatcacgacgactattatttttagtctgatcaatgggcacaatttctaagcagcgcagtggtggatgctcgcaaacttttgcgcaccgctggaaacccactaggttgagttgcaaaacgtaccgcgtagacgcccctggtggcgccgagagaagagctaggcctgcccagcacagagccggagagcgtcgggccttccggaagggtaagttctccgccaaggggtcccgagggagctggacgtctgaatctggacttgcccccagcttcggggttcgattctgggttttgcgcgtccccaacccccagggctttccgaagcatggcctggctccaggcccggtcctgtaaggactggaacggcagcaaaatgtgcagggaggcagtcggccggcagagctgcggcgggagccaaggtcaggcccgcggggagagcgggcagcttccagcgccggccacaagctcccaggccagctgggccgcagacccctttgcttccagagagcacaacccgcgtcctttctctcagccaggctgcagt

SEQ ID NO: 5133 - DNA, 600 bp, Homo sapiens
gcctcctcctccgctctgcaggcggggaccgcccggcgctcggcacccggcagcgcggccccctccagcccccggctcccggcagcagaagcagaaggcagcgccaggggccgccgccgccgccgagctccgcggggctcgggagccggccccggcgaggaggcgcggaaccatggccgatgggggcgagggcgaagacgagatccagttcctgcgaactgtaagcgccgtgcgtcgcgtgtgctgtcaggggaagggggcgtcagggcatccactagcggggtccgggcagagtgacagcgggcagcggggactcgcgggcggggcgagggggtgccccctgaggatgcgggaggagcgggcatcaccaagtgtgtgcaggtgtgcgtgttggggcgagggaaggcaagggcgcgtgtctgtgcgcgcgtgtggaaagctagaggatggagcgcggctagccggcggcaggcgcccgggctcggacccggggcaccggggacaggagcgtcggagctgcgggaaccgggagaggaggggacggccggtccggcctgcctggtggcacggctgggacctcccgggcggccgggggcaggg

SEQ ID NO: 5134 - DNA, 600 bp, Homo sapiens
ctcctcgccgctgtcgggctcgtcctgctgctgctgctgctgctcgtcgcgccggggcagccagctcaatgtgagcgagctgacgccgtccagccatgccagtgcgctccggcagcagtacgcgcagcagtccgcgcagcagtcggcgtccgcctcccagtaccaccagtgccacagcctgcagcccgccgccagccccacgggcagcctcggcagtctgggctccgggcccccgctctcgcaccaccaccaccacccgcacccggcgcaccaccagcaccaccagccccaggcgcgccgcgagagcaaccccttcaccgaaatagccatgagcagctgcaggtacaacgggggcgtcatgcggccgctcagcaacttgagcgcgtcccgccggaacctgcacgagatggactcagaggcgcagcccctgcagccccccgcgtctgtcggaggaggtggcggcgcgtcctccccgtctgcagccgctgccgccgccgccgctgtttcgtcctcagcccccgagatcgtggtgtctaagcccgagcacaacaactccaacaacctggcgctctatggaaccggcggcggaggcagcactgg

SEQ ID NO: 5135 - DNA, 598 bp, Homo sapiens
ctcaggccacacgcgagtcccgtggcccagcgggtgcccgggcaggggcgctcctctgcgcgccccgacgcctcgccggctcccgcggctccttacccgccgctctcgggcgcggggctccgcagctaggcccctgccgcccggtggccggcgtccgcggggccccgggcctcatactcctctccagacaggccgcgggctgcgggcggggtgggccgtggatcccgggcgcctaggaccgggacgcggcagcaaggcgtggagagagcccccgggggcgtcccatgaggcgttcgggatcggcgcctcctaggtgcgggctgtgcgggcagtcctgctcccgcccccggggctgagctggcggcgtcggcttcagagcctcggagccgagccgagtccggggaagcgctcctttctcagctccagccgaagagccgcccggcagggagaggcggagtcactggcgcccggggcggggtgttggggaggggtgagtagggacaggagggagggggtggagagttgggctgctgcgacgcctcccggtggctctggcggcaccaatgcggggcaccggagcaggtgtccgactgcggtg

SEQ ID NO: 5136 - DNA, 600 bp, Homo sapiens
gcagcgcggccccctccagcccccggctcccggcagcagaagcagaaggcagcgccaggggccgccgccgccgccgagctccgcggggctcgggagccggccccggcgaggaggcgcggaaccatggccgatgggggcgagggcgaagacgagatccagttcctgcgaactgtaagcgccgtgcgtcgcgtgtgctgtcaggggaagggggcgtcagggcatccactagcggggtccgggcagagtgacagcgggcagcggggactcgcgggcggggcgagggggtgccccctgaggatgcgggaggagcgggcatcaccaagtgtgtgcaggtgtgcgtgttggggcgagggaaggcaagggcgcgtgtctgtgcgcgcgtgtggaaagctagaggatggagcgcggctagccggcggcaggcgcccgggctcggacccggggcaccggggacaggagcgtcggagctgcgggaaccgggagaggaggggacggccggtccggcctgcctggtggcacggctgggacctcccgggcggccgggggcagggtgcagagcagggtggcccgtgggggcgcggggagcggcgggaactcggg

SEQ ID NO: 5137 - DNA, 600 bp, Homo sapiens
ttcctccttcaaaaccaaaccaaaccaccaccaacaaaaacttctgtgctactctggcttctctggttttgtttgggaacagtggaaccaagttagcccgggccagggcgcagatgatggactcagagcgcccagggaccctagagagaggagcactcctcaagagccccctggccatcacccgagcgccctggagcgccatcacccgaacgcgcgctccaggccctcgaacaaggcctctggctgccagagcgagtgaggggcgcagaggcggcagagagcggagagccccggtgtctccgcgagggcggcggcggccagcagacggcgatcgaggcgcgcgccacggcacggccagcgcagacacgccgcggggtctcgggccggagccgtgcagccgggcccgctgcctctttgcccctcatggctccgcgcgggaggaaaccgggccttctccgcccgccctcctctcgctgcggtgtccccagcacccccgccccgcccccgcgcggtccccaccgtcgcgctcccctccctcctcgccctcgctccgcgcctcctgttggcagagatggcctcgaaggcctcttccaatttgaa

SEQ ID NO: 5138 - DNA, 600 bp, Homo sapiens
cacacaccccctttccctgggctgttattatttttttttcctccttcaaaaccaaaccaaaccaccaccaacaaaaacttctgtgctactctggcttctctggttttgtttgggaacagtggaaccaagttagcccgggccagggcgcagatgatggactcagagcgcccagggaccctagagagaggagcactcctcaagagccccctggccatcacccgagcgccctggagcgccatcacccgaacgcgcgctccaggccctcgaacaaggcctctggctgccagagcgagtgaggggcgcagaggcggcagagagcggagagccccggtgtctccgcgagggcggcggcggccagcagacggcgatcgaggcgcgcgccacggcacggccagcgcagacacgccgcggggtctcgggccggagccgtgcagccgggcccgctgcctctttgcccctcatggctccgcgcgggaggaaaccgggccttctccgcccgccctcctctcgctgcggtgtccccagcacccccgccccgcccccgcgcggtccccaccgtcgcgctcccctccctcctcgccctcgctccgcgcctcctgt

SEQ ID NO: 5139 - DNA, 600 bp, Homo sapiens
gaattggctagaggagggatgaggtgacatttggtctctgaatgcgtctcggatcccggaccgcgagatccatcgctcccagtgcgtgcagttattccgtcctgctgtgtgacacgggagaatggcgcgcacgcctgtgcacctgcatcgaccgtgtagctgcctgggtgacagccacccatttgtctatgttttctttcctattctaaagtaaacgattagaagtggcctcatagagtcttaggaagaaacagtaagccctgtgccacccggggtcactgcctagccctgccctccgcgcgcaccgtccgcgtctccgagggctcctcctcggacctggaccctctggagcggcttcgaccctccctctgcccccgctgcctgcgtccagaccccctcccgggtgggctcctccgaggacctccgcagccgcgggcgagctgggtgcctgcgagtcgccgccgcagtctgagcctctggtgccccttagcgttggctctcggagttctgagaagggaaaggagacagacactctgggaaaatctggggtcacctcgattccggctcctacgctggatgccgtgggcaagcatcggtctc

SEQ ID NO: 5140 - DNA, 600 bp, Homo sapiens
cattggtccaaacggtgtcagtgaactttagctgcaaagaaactacctcatttaaaatttaagcagaccacagggagtagcattggaggaaagagaggagattttctccttcaacattttgagcatactggaatgccaaccccctaggtaggtgccagggccaccacaggaacctgactcgcaggagtcgtcctccgtctctacgcgaagcgccccctcgaggtgggcagggggtggcggcggcgacggtggcggagccgcagagcgagctagagagcgagagcggtgagactctgcggacgtcttcccgcccgccgcgctccgccccacccagcctccgcagcctcgggccggatcgcccggcggggaagatgcgcctcaagaaccaggtagaagcgcctcggcgcaggccccgcacccccgactctgcccgccctctgttacggacacccgctgggccacgtggtcgcgactggcttctcccagcggccagcctggccaccccgactcccagggagggggagagggcccttgcaagaggatcctgcccccgcgctgcccagacctgagggctcctggcgaccccacccgcagcccatc

SEQ ID NO: 5141 - DNA, 600 bp, Homo sapiens
tgtgccacccggggtcactgcctagccctgccctccgcgcgcaccgtccgcgtctccgagggctcctcctcggacctggaccctctggagcggcttcgaccctccctctgcccccgctgcctgcgtccagaccccctcccgggtgggctcctccgaggacctccgcagccgcgggcgagctgggtgcctgcgagtcgccgccgcagtctgagcctctggtgccccttagcgttggctctcggagttctgagaagggaaaggagacagacactctgggaaaatctggggtcacctcgattccggctcctacgctggatgccgtgggcaagcatcggtctcctttgatctgaagatcctgcccactccgccccttgcccctgccagacccgcgggagcagcaggtggcgtgggtgccagacgctgccggtgcgcaccgagtgcagcgctgccccggctcgccccgggggtcgcgtgggacagcggtttgcggtgtcgccctctctgcggtgctttccaaggaccctcatgccccgcccgggtgcacattcaccacatgggtcttactaggtgacctctttctaagtaaaatgcattgagaaa

SEQ ID NO: 5142 - DNA, 600 bp, Homo sapiens
tggcagcgcggaggcttggagagaagccccatgctggctcccattcagccggcccgttttcctcgagctttggaagtttcactcagccgtgcactcaatggcttcacaaagctgattacaagcttcagcgcattcctgaaggagccaaaagcgacgcaggtgcaaacgagccgagggagccccttatcccggtgacagaatgggacaagctgggaaaggcttagaccacacaagtccaaggctcaccaggccgcagaaagcctgccttgggaaccgggggtcattatccgccctattcagcggggcccggggaccctgggggccgagcgaggccagcccgggcgggagcaccgccgccagcgcgcgccggcgacaggggggaaccccgctgggcgctgcggccaggccggggctcagggcgctgggctgtgcgtttgcacaaatctgtgttccggcgggccggtgtcaaccctagtggggacacgggagaaagagcacgccagtaggccacgcggcgcgtgggcagtgcgcaacttctgtcggcgtccaggctgtacggccacgtttcagccggtgcccccaggccatggacacccagct

SEQ ID NO: 5143 - DNA, 600 bp, Homo sapiens
ggtgcgggcggaggccggcggggggcgccgggggcgctgcgcggcccttggcggcgggggcgcgcggggtggcgggggaggccgaggcgccggcagcttcgcgccggcggctggaagcgggcgggctgcacgggcggctcgagtgcggggaccccagcccctcgccctcgtgagcgccgcccctgccacctgctgccaagtcaccggactggggatgcggggggcggggtgcggggagaggaaagcgccgcgggtggcacggtgcctctggcgacagagtagatggacccgaaagagacccgaggtgacttcgggctgggcaggacacccccgggagttgccagcggctctcagcgggcgcctctaggaccccttgtcactgcgagcagcgcctgctctggggaggggctcgaaggcgccgcgccttctcaacgcgccgctgcgtcccccaggggctccaacttggacagctagactggaaatactgctgcacaaagttaggctgagttcgaaggacaccagagaggaagcgcaaggagatgcccttctccggagccgggcagagcgccagaactcctagacgggaaactttcccccatt

SEQ ID NO: 5144 - DNA, 600 bp, Homo sapiens
agcccacaactaggctgccgggaccggggagccagaccccaggtcgctccaactccggcgagggcggggaggggagtgacagcagcaactagcgcgcgctggcaaaagcacagagtctcggaataggctaaacggccggcgcggaggggtggaggcaagagggggcggaggaggagttgcccgagcggagagggatgacgtcctccagggccttgggctccgaggaaccgaagactggtgcgctcgccgggccccgcgcactagctctggggttcgcagaggcgccgcgcccggcttccgcggcagctccaacacagcgcgcaggcggtcgatcccggtcagcttaaaccgggcgcaagccctctgtccccctcaaagcacctctctgctcgtccctagtctccaggtgcccgtctgagagtccctgtcgcctccgggcggacccggccaggcagcccccggtcgggccagcctcgccccttcctcgctttctcccccatcgacctcgagccaagggcaggcggcccgcacccgcgcccctgcccacggggctaggcggcgctcccggcctacgcccggctgccaagaagagaaaggcgc

SEQ ID NO: 5145 - DNA, 600 bp, Homo sapiens
cgattgtgaggggctctgctggaatttggcagcgcggaggcttggagagaagccccatgctggctcccattcagccggcccgttttcctcgagctttggaagtttcactcagccgtgcactcaatggcttcacaaagctgattacaagcttcagcgcattcctgaaggagccaaaagcgacgcaggtgcaaacgagccgagggagccccttatcccggtgacagaatgggacaagctgggaaaggcttagaccacacaagtccaaggctcaccaggccgcagaaagcctgccttgggaaccgggggtcattatccgccctattcagcggggcccggggaccctgggggccgagcgaggccagcccgggcgggagcaccgccgccagcgcgcgccggcgacaggggggaaccccgctgggcgctgcggccaggccggggctcagggcgctgggctgtgcgtttgcacaaatctgtgttccggcgggccggtgtcaaccctagtggggacacgggagaaagagcacgccagtaggccacgcggcgcgtgggcagtgcgcaacttctgtcggcgtccaggctgtacggccacgtttcagccgg

SEQ ID NO: 5146 - DNA, 600 bp, Homo sapiens
tcagcagcaaacccctctcaactgcgtggcccgcgatcaacactctcatctttgcttagtaatgatacatttccaccacacattttcttatactgccttttactcgatgactcgtgatactattttcctctcattccttcccacctctacactgcccgcgttaccacacacccataaagcgacatcagcggtctccagggcggaaaggggtggaagctgaccctcgcccttccctccagcgctggcttcaggtgtgccttctgctacctcctgtactgcgaacaggggcccgccgagctccgggagcccctagaagaggaagactcctctggccccactaggtatcatccgcgctctcccgctttccacctgcgccctcgcttgggccaatctctgccgcacgtgtccatccctgaactgcacgctatcctccacccccggggggttcctgcgcactgaaagaccgttctccggcaggttttgggatccggcgacggctgaccgcgcgccgcccccacgcccggttccacgatgctgcaatacagaaagtttacgtcggccccgacccgcgcgggactgcagggtccgccggagcgcggc

SEQ ID NO: 5147 - DNA, 600 bp, Homo sapiens
cacacacatgcacacattttctcgcgctctctccggctctcctttgtttattttctaatctatatttttactggaagatttcctctttattctctcccgccctcctacaagcgctcttgctggccgtctgggtgcacacaccgctccctcgatcaccccagcccccttcctggtctcccgagcgcggggtttgaaggtcacctcctttccagtccccgtgcgagccgcgctgccgccgcctcctccagccagagtcggtgggactggctgcgctgccctgaagtggttctccaagcagcgcggagggtggcggacggcggacggagcccaggggccgcgtcgggtggggaaacccgaactcgcggaggggaatccctccccctccgccccagccccccagcagcacccgcggtggggcgggggcgctctgccagccccgggaacagcagaggcggcggcactggctggacccacgcgcgcgcctccggggctgaagaaggaaggagtgagccgagccgagcaccccacatctggaggggacagccagccgtgggccccgccccggcgtccggagcaggagaactccgagcttcttgccca

SEQ ID NO: 5148 - DNA, 600 bp, Homo sapiens
cacacattttctcgcgctctctccggctctcctttgtttattttctaatctatatttttactggaagatttcctctttattctctcccgccctcctacaagcgctcttgctggccgtctgggtgcacacaccgctccctcgatcaccccagcccccttcctggtctcccgagcgcggggtttgaaggtcacctcctttccagtccccgtgcgagccgcgctgccgccgcctcctccagccagagtcggtgggactggctgcgctgccctgaagtggttctccaagcagcgcggagggtggcggacggcggacggagcccaggggccgcgtcgggtggggaaacccgaactcgcggaggggaatccctccccctccgccccagccccccagcagcacccgcggtggggcgggggcgctctgccagccccgggaacagcagaggcggcggcactggctggacccacgcgcgcgcctccggggctgaagaaggaaggagtgagccgagccgagcaccccacatctggaggggacagccagccgtgggccccgccccggcgtccggagcaggagaactccgagcttcttgcccaggcagagaga

SEQ ID NO: 5149 - DNA, 600 bp, Homo sapiens
cacacacacatgcacacattttctcgcgctctctccggctctcctttgtttattttctaatctatatttttactggaagatttcctctttattctctcccgccctcctacaagcgctcttgctggccgtctgggtgcacacaccgctccctcgatcaccccagcccccttcctggtctcccgagcgcggggtttgaaggtcacctcctttccagtccccgtgcgagccgcgctgccgccgcctcctccagccagagtcggtgggactggctgcgctgccctgaagtggttctccaagcagcgcggagggtggcggacggcggacggagcccaggggccgcgtcgggtggggaaacccgaactcgcggaggggaatccctccccctccgccccagccccccagcagcacccgcggtggggcgggggcgctctgccagccccgggaacagcagaggcggcggcactggctggacccacgcgcgcgcctccggggctgaagaaggaaggagtgagccgagccgagcaccccacatctggaggggacagccagccgtgggccccgccccggcgtccggagcaggagaactccgagcttcttgcc

SEQ ID NO: 5150 - DNA, 600 bp, Homo sapiens
ggtgcccgggaaccgctcgccgaaggaggaagcgccgtccgtctgtccttccccggcggcggcggcgagcggagcgcaggagccccgcactccacacactcatgcacacacacactcacacacactcacacactctcccacaacacaataccctgacacacactcacacgcacgccgcactcacaccgggtgcctgggaaaatcgcagacgccggggaggagcagggggcggtgatgggaaggggagctgcgaggcgaagtgttcttcagggaagcgggctcgagtctccgcagctgcggcggcggcggcggcgcgctgggccggcggcgggcgcgggcagggggccgggggtgccgcgcggtaggagcctggcttggacagccgaggagcaggaagtggcctctgacccaggacaccgagcagggctctcttgcctggattcgcctttacaaagtaactcgcgaaggtccccggaggggcgtcaagcggcgacagcggcccgcccgcccgcagtccgaagcccccagccctgctgtcttgccttcccccattccatcagttgccattgcaacgccaatcctgttacacgatacagactc

SEQ ID NO: 5151 - DNA, 600 bp, Homo sapiens
ggccaagccgaggtgcccgggaaccgctcgccgaaggaggaagcgccgtccgtctgtccttccccggcggcggcggcgagcggagcgcaggagccccgcactccacacactcatgcacacacacactcacacacactcacacactctcccacaacacaataccctgacacacactcacacgcacgccgcactcacaccgggtgcctgggaaaatcgcagacgccggggaggagcagggggcggtgatgggaaggggagctgcgaggcgaagtgttcttcagggaagcgggctcgagtctccgcagctgcggcggcggcggcggcgcgctgggccggcggcgggcgcgggcagggggccgggggtgccgcgcggtaggagcctggcttggacagccgaggagcaggaagtggcctctgacccaggacaccgagcagggctctcttgcctggattcgcctttacaaagtaactcgcgaaggtccccggaggggcgtcaagcggcgacagcggcccgcccgcccgcagtccgaagcccccagccctgctgtcttgccttcccccattccatcagttgccattgcaacgccaatcctgttacac

SEQ ID NO: 5152 - DNA, 600 bp, Homo sapiens
gcgcggtcagcacgaggaccagcacgaccacgaccttggcgttcatggcgcgggcgggcgggcgggcgggcggacgagcgcgggtcgggggccggacgccgagcgggcaatgcggctgacggagagtgaaagtgcggcggtgggaggcgcgcgccgggcgctttagaggggagagccaggcggggcggggcggggcgcgcggtgaggggcgggcccggagccgagtgctggccgtggccggggtctctgacgcgcgactccctcggcggcaccccccacccatccccttcgcccctcctccgctccctctgtgctcccgaggcgcagtgcgctccggcctttgaccttctcaggctccgctgggccccgcaccgctggcccggtctgcagtgaggtccgcagcctgagcgacgccggctggagggccgcttattgtccctgtgacagggccccactggagagactgaggaccttaggcgtaaagtggggcgcgcgtggaaagctgcgggacggggcctttcgatggcgggaactgaatgagaaccaatgaaaagcaaacaagttagtcccgggcggagggcctgctggcggtggcggccc

SEQ ID NO: 5153 - DNA, 600 bp, Homo sapiens
cacgaccacgaccttggcgttcatggcgcgggcgggcgggcgggcgggcggacgagcgcgggtcgggggccggacgccgagcgggcaatgcggctgacggagagtgaaagtgcggcggtgggaggcgcgcgccgggcgctttagaggggagagccaggcggggcggggcggggcgcgcggtgaggggcgggcccggagccgagtgctggccgtggccggggtctctgacgcgcgactccctcggcggcaccccccacccatccccttcgcccctcctccgctccctctgtgctcccgaggcgcagtgcgctccggcctttgaccttctcaggctccgctgggccccgcaccgctggcccggtctgcagtgaggtccgcagcctgagcgacgccggctggagggccgcttattgtccctgtgacagggccccactggagagactgaggaccttaggcgtaaagtggggcgcgcgtggaaagctgcgggacggggcctttcgatggcgggaactgaatgagaaccaatgaaaagcaaacaagttagtcccgggcggagggcctgctggcggtggcggcccaaggcagccgagggggtcctgc

SEQ ID NO: 5154 - DNA, 600 bp, Homo sapiens
gaaacggtcccttctggatagtcggaacatagaggaaaacgggggtgggttaggggaacacttactcttgtggggccctgcgctggcgaatgtcaagcctccaggttcacaaatggctggaggtgctcggggttagctcccgagggcggcaagcgccgaccggtcctcgctcgctaggcaggcgcctccggattccgttcatgcctctcggagctacagggcttggtgcggagacgcagggcgggcgcgctgggctctgggtgtccgcaacccaaagtgcagctggtgtcttgacgctaccgtctatgcacaagccggcggcggcggcggagcttggaggaggcagggagattccaaataaatccactaattctgggctgagcgctccggcgtgcgagcccgcctgcctgccaaatgtaactgtgaagtgatgtggaaaagtgagccgggtgcctcccctgacggatctcattgggcagagcgcagaggcaggtctaccacttggaaattcatgtaagcagtcccccctccccgccccctccccgccttcccccttcgctctcccgcgctggctcgatcgctctctttccccctacccaa

SEQ ID NO: 5155 - DNA, 600 bp, Homo sapiens
catagaggaaaacgggggtgggttaggggaacacttactcttgtggggccctgcgctggcgaatgtcaagcctccaggttcacaaatggctggaggtgctcggggttagctcccgagggcggcaagcgccgaccggtcctcgctcgctaggcaggcgcctccggattccgttcatgcctctcggagctacagggcttggtgcggagacgcagggcgggcgcgctgggctctgggtgtccgcaacccaaagtgcagctggtgtcttgacgctaccgtctatgcacaagccggcggcggcggcggagcttggaggaggcagggagattccaaataaatccactaattctgggctgagcgctccggcgtgcgagcccgcctgcctgccaaatgtaactgtgaagtgatgtggaaaagtgagccgggtgcctcccctgacggatctcattgggcagagcgcagaggcaggtctaccacttggaaattcatgtaagcagtcccccctccccgccccctccccgccttcccccttcgctctcccgcgctggctcgatcgctctctttccccctacccaagtgggcgcacaacttttcgctcctcgc

SEQ ID NO: 5156 - DNA, 600 bp, Homo sapiens
ggtggatgctcgcaaacttttgcgcaccgctggaaacccactaggttgagttgcaaaacgtaccgcgtagacgcccctggtggcgccgagagaagagctaggcctgcccagcacagagccggagagcgtcgggccttccggaagggtaagttctccgccaaggggtcccgagggagctggacgtctgaatctggacttgcccccagcttcggggttcgattctgggttttgcgcgtccccaacccccagggctttccgaagcatggcctggctccaggcccggtcctgtaaggactggaacggcagcaaaatgtgcagggaggcagtcggccggcagagctgcggcgggagccaaggtcaggcccgcggggagagcgggcagcttccagcgccggccacaagctcccaggccagctgggccgcagacccctttgcttccagagagcacaacccgcgtcctttctctcagccaggctgcagtggctgccccgagcttcgctttcgtttcccaagctgttaataacgatatgtccccaaatccgaggctcgtgtttgctcccagatgccaagaacgcaacccgaaatccttctcccaaaccc

SEQ ID NO: 5157 - DNA, 600 bp, Homo sapiens
gcaaggtgtccgaaggggcatgggaattcctataagaaacggtcccttctggatagtcggaacatagaggaaaacgggggtgggttaggggaacacttactcttgtggggccctgcgctggcgaatgtcaagcctccaggttcacaaatggctggaggtgctcggggttagctcccgagggcggcaagcgccgaccggtcctcgctcgctaggcaggcgcctccggattccgttcatgcctctcggagctacagggcttggtgcggagacgcagggcgggcgcgctgggctctgggtgtccgcaacccaaagtgcagctggtgtcttgacgctaccgtctatgcacaagccggcggcggcggcggagcttggaggaggcagggagattccaaataaatccactaattctgggctgagcgctccggcgtgcgagcccgcctgcctgccaaatgtaactgtgaagtgatgtggaaaagtgagccgggtgcctcccctgacggatctcattgggcagagcgcagaggcaggtctaccacttggaaattcatgtaagcagtcccccctccccgccccctccccgccttcccccttcgctctccc

SEQ ID NO: 5158 - DNA, 598 bp, Homo sapiens
atctgaggggcaggaggcgcgcaaggtgtccgaaggggcatgggaattcctataagaaacggtcccttctggatagtcggaacatagaggaaaacgggggtgggttaggggaacacttactcttgtggggccctgcgctggcgaatgtcaagcctccaggttcacaaatggctggaggtgctcggggttagctcccgagggcggcaagcgccgaccggtcctcgctcgctaggcaggcgcctccggattccgttcatgcctctcggagctacagggcttggtgcggagacgcagggcgggcgcgctgggctctgggtgtccgcaacccaaagtgcagctggtgtcttgacgctaccgtctatgcacaagccggcggcggcggcggagcttggaggaggcagggagattccaaataaatccactaattctgggctgagcgctccggcgtgcgagcccgcctgcctgccaaatgtaactgtgaagtgatgtggaaaagtgagccgggtgcctcccctgacggatctcattgggcagagcgcagaggcaggtctaccacttggaaattcatgtaagcagtcccccctccccgccccctccc

SEQ ID NO: 5159 - DNA, 600 bp, Homo sapiens
accagagcgcccagctaagcgagctgcctccacccccactgtgtcgggcggcgcaaactgcgggcgcaggcagaggagccgcggctctgcgccgggcgggagccgaagcccagagcctcgccagggcctccccgccgagcgcacttaccgtcgctgaggcagagcgcggtcagcacgaggaccagcacgaccacgaccttggcgttcatggcgcgggcgggcgggcgggcgggcggacgagcgcgggtcgggggccggacgccgagcgggcaatgcggctgacggagagtgaaagtgcggcggtgggaggcgcgcgccgggcgctttagaggggagagccaggcggggcggggcggggcgcgcggtgaggggcgggcccggagccgagtgctggccgtggccggggtctctgacgcgcgactccctcggcggcaccccccacccatccccttcgcccctcctccgctccctctgtgctcccgaggcgcagtgcgctccggcctttgaccttctcaggctccgctgggccccgcaccgctggcccggtctgcagtgaggtccgcagcctgagcgacgccggctggagggccgcttattgtc

SEQ ID NO: 5160 - DNA, 600 bp, Homo sapiens
cctggtggcgccgagagaagagctaggcctgcccagcacagagccggagagcgtcgggccttccggaagggtaagttctccgccaaggggtcccgagggagctggacgtctgaatctggacttgcccccagcttcggggttcgattctgggttttgcgcgtccccaacccccagggctttccgaagcatggcctggctccaggcccggtcctgtaaggactggaacggcagcaaaatgtgcagggaggcagtcggccggcagagctgcggcgggagccaaggtcaggcccgcggggagagcgggcagcttccagcgccggccacaagctcccaggccagctgggccgcagacccctttgcttccagagagcacaacccgcgtcctttctctcagccaggctgcagtggctgccccgagcttcgctttcgtttcccaagctgttaataacgatatgtccccaaatccgaggctcgtgtttgctcccagatgccaagaacgcaacccgaaatccttctcccaaaccctaggtcgacgagatgagttcctacttgacctctgagccgaggtgggccggaaaccgaggcctaggccccgccggg

SEQ ID NO: 5161 - DNA, 600 bp, Homo sapiens
cgcaccagagcgcccagctaagcgagctgcctccacccccactgtgtcgggcggcgcaaactgcgggcgcaggcagaggagccgcggctctgcgccgggcgggagccgaagcccagagcctcgccagggcctccccgccgagcgcacttaccgtcgctgaggcagagcgcggtcagcacgaggaccagcacgaccacgaccttggcgttcatggcgcgggcgggcgggcgggcgggcggacgagcgcgggtcgggggccggacgccgagcgggcaatgcggctgacggagagtgaaagtgcggcggtgggaggcgcgcgccgggcgctttagaggggagagccaggcggggcggggcggggcgcgcggtgaggggcgggcccggagccgagtgctggccgtggccggggtctctgacgcgcgactccctcggcggcaccccccacccatccccttcgcccctcctccgctccctctgtgctcccgaggcgcagtgcgctccggcctttgaccttctcaggctccgctgggccccgcaccgctggcccggtctgcagtgaggtccgcagcctgagcgacgccggctggagggccgcttatt

SEQ ID NO: 5162 - DNA, 600 bp, Homo sapiens
agcgagctgcctccacccccactgtgtcgggcggcgcaaactgcgggcgcaggcagaggagccgcggctctgcgccgggcgggagccgaagcccagagcctcgccagggcctccccgccgagcgcacttaccgtcgctgaggcagagcgcggtcagcacgaggaccagcacgaccacgaccttggcgttcatggcgcgggcgggcgggcgggcgggcggacgagcgcgggtcgggggccggacgccgagcgggcaatgcggctgacggagagtgaaagtgcggcggtgggaggcgcgcgccgggcgctttagaggggagagccaggcggggcggggcggggcgcgcggtgaggggcgggcccggagccgagtgctggccgtggccggggtctctgacgcgcgactccctcggcggcaccccccacccatccccttcgcccctcctccgctccctctgtgctcccgaggcgcagtgcgctccggcctttgaccttctcaggctccgctgggccccgcaccgctggcccggtctgcagtgaggtccgcagcctgagcgacgccggctggagggccgcttattgtccctgtgacagggcccca

SEQ ID NO: 5163 - DNA, 600 bp, Homo sapiens
ctaagcgagctgcctccacccccactgtgtcgggcggcgcaaactgcgggcgcaggcagaggagccgcggctctgcgccgggcgggagccgaagcccagagcctcgccagggcctccccgccgagcgcacttaccgtcgctgaggcagagcgcggtcagcacgaggaccagcacgaccacgaccttggcgttcatggcgcgggcgggcgggcgggcgggcggacgagcgcgggtcgggggccggacgccgagcgggcaatgcggctgacggagagtgaaagtgcggcggtgggaggcgcgcgccgggcgctttagaggggagagccaggcggggcggggcggggcgcgcggtgaggggcgggcccggagccgagtgctggccgtggccggggtctctgacgcgcgactccctcggcggcaccccccacccatccccttcgcccctcctccgctccctctgtgctcccgaggcgcagtgcgctccggcctttgaccttctcaggctccgctgggccccgcaccgctggcccggtctgcagtgaggtccgcagcctgagcgacgccggctggagggccgcttattgtccctgtgacagggcc

SEQ ID NO: 5164 - DNA, 600 bp, Homo sapiens
ggctgcgctgccctgaagtggttctccaagcagcgcggagggtggcggacggcggacggagcccaggggccgcgtcgggtggggaaacccgaactcgcggaggggaatccctccccctccgccccagccccccagcagcacccgcggtggggcgggggcgctctgccagccccgggaacagcagaggcggcggcactggctggacccacgcgcgcgcctccggggctgaagaaggaaggagtgagccgagccgagcaccccacatctggaggggacagccagccgtgggccccgccccggcgtccggagcaggagaactccgagcttcttgcccaggcagagagagcaggagcggaccgcgcgcccgggattgagagtccttgcgctccagacccccacccagtggccgccagggtccccgcctgtccggaccctcgccgcgcccaggcaggcgcgccagggcggggctgacctgcccgcgaagttgcggacagtgcgtgagaaaccagcacccccttccgccgcctccagcttatggtgagtgtggctgggggtgcagagagcgcacgggaattcgggggtctggggccgagaacgtga

SEQ ID NO: 5165 - DNA, 600 bp, Homo sapiens
caccacaggaacctgactcgcaggagtcgtcctccgtctctacgcgaagcgccccctcgaggtgggcagggggtggcggcggcgacggtggcggagccgcagagcgagctagagagcgagagcggtgagactctgcggacgtcttcccgcccgccgcgctccgccccacccagcctccgcagcctcgggccggatcgcccggcggggaagatgcgcctcaagaaccaggtagaagcgcctcggcgcaggccccgcacccccgactctgcccgccctctgttacggacacccgctgggccacgtggtcgcgactggcttctcccagcggccagcctggccaccccgactcccagggagggggagagggcccttgcaagaggatcctgcccccgcgctgcccagacctgagggctcctggcgaccccacccgcagcccatctggcggctctggccccgcaggtcagggtcacacccctgccggcctcctgagacttcccggccccaggggagagagctgaaacttgggttgacgcgcgccccctccccagcgacaggcgaccccgcagcagccccgcgccactcctctctgcgcctttccgt

SEQ ID NO: 5166 - DNA, 600 bp, Homo sapiens
cgtacgtacgttatcacccacggatatcgcgaaagacacagcttagcccagagcctatgctaagaaccctcatccaccatctgaggggcaggaggcgcgcaaggtgtccgaaggggcatgggaattcctataagaaacggtcccttctggatagtcggaacatagaggaaaacgggggtgggttaggggaacacttactcttgtggggccctgcgctggcgaatgtcaagcctccaggttcacaaatggctggaggtgctcggggttagctcccgagggcggcaagcgccgaccggtcctcgctcgctaggcaggcgcctccggattccgttcatgcctctcggagctacagggcttggtgcggagacgcagggcgggcgcgctgggctctgggtgtccgcaacccaaagtgcagctggtgtcttgacgctaccgtctatgcacaagccggcggcggcggcggagcttggaggaggcagggagattccaaataaatccactaattctgggctgagcgctccggcgtgcgagcccgcctgcctgccaaatgtaactgtgaagtgatgtggaaaagtgagccgggtgcctcccctgacggat

SEQ ID NO: 5167 - DNA, 600 bp, Homo sapiens
tctccttcaacattttgagcatactggaatgccaaccccctaggtaggtgccagggccaccacaggaacctgactcgcaggagtcgtcctccgtctctacgcgaagcgccccctcgaggtgggcagggggtggcggcggcgacggtggcggagccgcagagcgagctagagagcgagagcggtgagactctgcggacgtcttcccgcccgccgcgctccgccccacccagcctccgcagcctcgggccggatcgcccggcggggaagatgcgcctcaagaaccaggtagaagcgcctcggcgcaggccccgcacccccgactctgcccgccctctgttacggacacccgctgggccacgtggtcgcgactggcttctcccagcggccagcctggccaccccgactcccagggagggggagagggcccttgcaagaggatcctgcccccgcgctgcccagacctgagggctcctggcgaccccacccgcagcccatctggcggctctggccccgcaggtcagggtcacacccctgccggcctcctgagacttcccggccccaggggagagagctgaaacttgggttgacgcgcgccccctc

SEQ ID NO: 5168 - DNA, 600 bp, Homo sapiens
cccttttttcgtagctgctgacgcgctggtggtgcctattaatcatttaccagtccagagccgcgccagttaatggctgtgccgtgcggtgctcccacatcctggcctctcctctccacggtcgcctgtgcccgggcaccccggagctgcaaactgcagagcccaggcaaccgctgggctgtgcgccccgccggcgccggtaggagccgcgctccccgcagcggttgcgctctacccggaggcgctgggcggctgtgggctgcaggcaagcggtcgggtggggagggagggcgcaggcggcgggtgcgcgaggagaaagccccagccctggcagccccactggcccccctcagctgggatgttccccaatggcaccgcctcctctccttcctcctctcctagccccagcccgggcagctgcggcgaaggcggcggcagcaggggccccggggccggcgctgcggacggcatggaggagccagggcgaaatgcgtcccagaacgggaccttgagcgagggccagggcagcgccatcctgatctctttcatctactccgtggtgtgcctggtggggctgtgtgggaactctatggtcatcta

SEQ ID NO: 5169 - DNA, 600 bp, Homo sapiens
gagggaaccccggaaggagccactaaagttgagcagagtgcaggactgggaaggaaaaaaatggggggcgggggggacaagccacctatgtgctctcctccctttctccaccccacccccttttttcgtagctgctgacgcgctggtggtgcctattaatcatttaccagtccagagccgcgccagttaatggctgtgccgtgcggtgctcccacatcctggcctctcctctccacggtcgcctgtgcccgggcaccccggagctgcaaactgcagagcccaggcaaccgctgggctgtgcgccccgccggcgccggtaggagccgcgctccccgcagcggttgcgctctacccggaggcgctgggcggctgtgggctgcaggcaagcggtcgggtggggagggagggcgcaggcggcgggtgcgcgaggagaaagccccagccctggcagccccactggcccccctcagctgggatgttccccaatggcaccgcctcctctccttcctcctctcctagccccagcccgggcagctgcggcgaaggcggcggcagcaggggccccggggccggcgctgcggacggcatggaggagccagg

SEQ ID NO: 5170 - DNA, 600 bp, Homo sapiens
cgtcccgcacatcctcatagacaacgccctggggctccttcttttctccagggcgccacatcttcctcgggctgcgcttcattgaccccaccccggacgccatctggtgcatctgctccccacgagcgcgggcacctggggcgagagagcgctgtcagccggccaggcgctggggtccgcgcgagcccgagctctccctcgctgcagctcacaggcagcgaaaatctcgctccgcgagagccctggagaacttctggaaggagttctcaggcccgcgctacttacagtgcaggaagcaagcggggcgtgaagaggaggtagaaacacagacctccctagcaaagagggaggcggcgcagcgtctgccgaggactcgccccttcaggaacaaagtgactcccccgtcccgctgtcctgcagctgcagcagcgcactcccagagtcaagcgtgtcaggtcggtgtggatgcagcgaatttgttgtaatctacacattaagagcccccttgcctcgccctgccccctccaaccgtgtgtgtgtgtgtgtgtgtgtgtgtgtgtgtgtgtgtgtgtgtgtgtgtgtaaagagacaggacgagag

SEQ ID NO: 5171 - DNA, 600 bp, Homo sapiens
cgcacatcctcatagacaacgccctggggctccttcttttctccagggcgccacatcttcctcgggctgcgcttcattgaccccaccccggacgccatctggtgcatctgctccccacgagcgcgggcacctggggcgagagagcgctgtcagccggccaggcgctggggtccgcgcgagcccgagctctccctcgctgcagctcacaggcagcgaaaatctcgctccgcgagagccctggagaacttctggaaggagttctcaggcccgcgctacttacagtgcaggaagcaagcggggcgtgaagaggaggtagaaacacagacctccctagcaaagagggaggcggcgcagcgtctgccgaggactcgccccttcaggaacaaagtgactcccccgtcccgctgtcctgcagctgcagcagcgcactcccagagtcaagcgtgtcaggtcggtgtggatgcagcgaatttgttgtaatctacacattaagagcccccttgcctcgccctgccccctccaaccgtgtgtgtgtgtgtgtgtgtgtgtgtgtgtgtgtgtgtgtgtgtgtgtgtgtaaagagacaggacgagagaatga

SEQ ID NO: 5172 - DNA, 600 bp, Homo sapiens
tcgtagctgctgacgcgctggtggtgcctattaatcatttaccagtccagagccgcgccagttaatggctgtgccgtgcggtgctcccacatcctggcctctcctctccacggtcgcctgtgcccgggcaccccggagctgcaaactgcagagcccaggcaaccgctgggctgtgcgccccgccggcgccggtaggagccgcgctccccgcagcggttgcgctctacccggaggcgctgggcggctgtgggctgcaggcaagcggtcgggtggggagggagggcgcaggcggcgggtgcgcgaggagaaagccccagccctggcagccccactggcccccctcagctgggatgttccccaatggcaccgcctcctctccttcctcctctcctagccccagcccgggcagctgcggcgaaggcggcggcagcaggggccccggggccggcgctgcggacggcatggaggagccagggcgaaatgcgtcccagaacgggaccttgagcgagggccagggcagcgccatcctgatctctttcatctactccgtggtgtgcctggtggggctgtgtgggaactctatggtcatctacgtgatcc

SEQ ID NO: 5173 - DNA, 600 bp, Homo sapiens
gcaaaaccttgaggcgtacgtacgttatcacccacggatatcgcgaaagacacagcttagcccagagcctatgctaagaaccctcatccaccatctgaggggcaggaggcgcgcaaggtgtccgaaggggcatgggaattcctataagaaacggtcccttctggatagtcggaacatagaggaaaacgggggtgggttaggggaacacttactcttgtggggccctgcgctggcgaatgtcaagcctccaggttcacaaatggctggaggtgctcggggttagctcccgagggcggcaagcgccgaccggtcctcgctcgctaggcaggcgcctccggattccgttcatgcctctcggagctacagggcttggtgcggagacgcagggcgggcgcgctgggctctgggtgtccgcaacccaaagtgcagctggtgtcttgacgctaccgtctatgcacaagccggcggcggcggcggagcttggaggaggcagggagattccaaataaatccactaattctgggctgagcgctccggcgtgcgagcccgcctgcctgccaaatgtaactgtgaagtgatgtggaaaagtgagccgggtgc

SEQ ID NO: 5174 - DNA, 600 bp, Homo sapiens
acctcccagccgtctccgccgcccgagcatccttgaggtgggacgagcaggggcttggatccctgccggccgtctggtgtgtgaggcttgcacggcccctggctgccccgcgcctcgccggagcccgagggggcgcaggtccggggcgagggccggccgggctgtttgatggcttcactgagaagagtcaaagtgctgttggtgttgaacttgatcgcggtagccggcttcgtgctcttcctggccaagtgccggcccatcgcggtgcgcagcggagacgccttccacgagatccggccgcgcgccgaggtggccaacctcagcgcgcacagcgccagccccatccaggatgcggtcctgaagcgcctgtcgctgctggaggacatcgtgtaccggcagctgaatggtaaggacgcacgccggcgcctccggggctcgacgcgggcgggccgggcacagggtgagccccagggtccttgcgcgctgcgccctgtgcctgggagccggcacaccctggctcccgcgcgctccttcttacccttcctgccccgtttcgggcagatggccggggctgctggaaagaacaacttgcctgattct

SEQ ID NO: 5175 - DNA, 600 bp, Homo sapiens
cgccgcactcacaccgggtgcctgggaaaatcgcagacgccggggaggagcagggggcggtgatgggaaggggagctgcgaggcgaagtgttcttcagggaagcgggctcgagtctccgcagctgcggcggcggcggcggcgcgctgggccggcggcgggcgcgggcagggggccgggggtgccgcgcggtaggagcctggcttggacagccgaggagcaggaagtggcctctgacccaggacaccgagcagggctctcttgcctggattcgcctttacaaagtaactcgcgaaggtccccggaggggcgtcaagcggcgacagcggcccgcccgcccgcagtccgaagcccccagccctgctgtcttgccttcccccattccatcagttgccattgcaacgccaatcctgttacacgatacagactcgcatcgccgaacggggagaggaggaagaggaggaggaggaagaggaggaggaggaagaggaggagtggggctaggggaacgggggtggggaagagggaagggaggagggggaagaaggaggaggaaagggtccaacagggagcggagtgtgcgtctggagctcgcttgggca

SEQ ID NO: 5176 - DNA, 600 bp, Homo sapiens
acacacactcacacactctcccacaacacaataccctgacacacactcacacgcacgccgcactcacaccgggtgcctgggaaaatcgcagacgccggggaggagcagggggcggtgatgggaaggggagctgcgaggcgaagtgttcttcagggaagcgggctcgagtctccgcagctgcggcggcggcggcggcgcgctgggccggcggcgggcgcgggcagggggccgggggtgccgcgcggtaggagcctggcttggacagccgaggagcaggaagtggcctctgacccaggacaccgagcagggctctcttgcctggattcgcctttacaaagtaactcgcgaaggtccccggaggggcgtcaagcggcgacagcggcccgcccgcccgcagtccgaagcccccagccctgctgtcttgccttcccccattccatcagttgccattgcaacgccaatcctgttacacgatacagactcgcatcgccgaacggggagaggaggaagaggaggaggaggaagaggaggaggaggaagaggaggagtggggctaggggaacgggggtggggaagagggaagggaggagggggaagaag

SEQ ID NO: 5177 - DNA, 600 bp, Homo sapiens
acacaataccctgacacacactcacacgcacgccgcactcacaccgggtgcctgggaaaatcgcagacgccggggaggagcagggggcggtgatgggaaggggagctgcgaggcgaagtgttcttcagggaagcgggctcgagtctccgcagctgcggcggcggcggcggcgcgctgggccggcggcgggcgcgggcagggggccgggggtgccgcgcggtaggagcctggcttggacagccgaggagcaggaagtggcctctgacccaggacaccgagcagggctctcttgcctggattcgcctttacaaagtaactcgcgaaggtccccggaggggcgtcaagcggcgacagcggcccgcccgcccgcagtccgaagcccccagccctgctgtcttgccttcccccattccatcagttgccattgcaacgccaatcctgttacacgatacagactcgcatcgccgaacggggagaggaggaagaggaggaggaggaagaggaggaggaggaagaggaggagtggggctaggggaacgggggtggggaagagggaagggaggagggggaagaaggaggaggaaagggtccaacagggag

SEQ ID NO: 5178 - DNA, 600 bp, Homo sapiens
gagactccgagacgcctaaccctgggccgcgaggtcgcctgttacaaagggacaactttctacccgctccgcgttccctcccgattctccagctctgcctggctcggaatcccagagccaggatgggaactcggggttgcctcgcctcctagatctccggcgagaggtccgagggggtggcggagagctgcaggagcgatggaggagtgggcagattgctcaagggatgggggtgcccaaaagcaacagcctgccaaaaactaagagggacggggaggggggacctttgcagactttcttcgttttcttagatttcaaacttgcaaggatcgcaaggatccagggccccaggaaaggaggggtgtgaaggactcaaaattccagcagcttggctggggtggctgcgccagacgggcccttccccaaagtgcaaacccacccctgtcctcggccccggcgcgctccctccctcagcccggggccgtacaccacctgccctctaccgagagatctgggcggcggcggccgaaagcagcgacgcgcccggagcatcccttgcgatacgctaggggacggtgctttctctgtcccagttgcgtg

SEQ ID NO: 5179 - DNA, 600 bp, Homo sapiens
cccgcactccacacactcatgcacacacacactcacacacactcacacactctcccacaacacaataccctgacacacactcacacgcacgccgcactcacaccgggtgcctgggaaaatcgcagacgccggggaggagcagggggcggtgatgggaaggggagctgcgaggcgaagtgttcttcagggaagcgggctcgagtctccgcagctgcggcggcggcggcggcgcgctgggccggcggcgggcgcgggcagggggccgggggtgccgcgcggtaggagcctggcttggacagccgaggagcaggaagtggcctctgacccaggacaccgagcagggctctcttgcctggattcgcctttacaaagtaactcgcgaaggtccccggaggggcgtcaagcggcgacagcggcccgcccgcccgcagtccgaagcccccagccctgctgtcttgccttcccccattccatcagttgccattgcaacgccaatcctgttacacgatacagactcgcatcgccgaacggggagaggaggaagaggaggaggaggaagaggaggaggaggaagaggaggagtggggctaggggaacggg

SEQ ID NO: 5180 - DNA, 600 bp, Homo sapiens
cccttggcggcgggggcgcgcggggtggcgggggaggccgaggcgccggcagcttcgcgccggcggctggaagcgggcgggctgcacgggcggctcgagtgcggggaccccagcccctcgccctcgtgagcgccgcccctgccacctgctgccaagtcaccggactggggatgcggggggcggggtgcggggagaggaaagcgccgcgggtggcacggtgcctctggcgacagagtagatggacccgaaagagacccgaggtgacttcgggctgggcaggacacccccgggagttgccagcggctctcagcgggcgcctctaggaccccttgtcactgcgagcagcgcctgctctggggaggggctcgaaggcgccgcgccttctcaacgcgccgctgcgtcccccaggggctccaacttggacagctagactggaaatactgctgcacaaagttaggctgagttcgaaggacaccagagaggaagcgcaaggagatgcccttctccggagccgggcagagcgccagaactcctagacgggaaactttcccccattgaagctagaaccggtcatgcgactcggctaagtgtggggaaaca

SEQ ID NO: 5181 - DNA, 600 bp, Homo sapiens
ggcctcagtttccctttctgtaaaatgcaggtgaagaggcatgagctcaggattcctaaagccctacggggctgagcaaggacggtgctttgcgtttgcctcccttcccccagcccgcccgagagggtttgctggggcagggtggcccctgggacgggttccagacagttctaggcgctcaggtccgcagctgtgctacccccgccgcccgggacgcccggtccccgccagggccctctcactgtagctttaaggagggctggggccgggtgcagcggcacctggagtctcggtggaacccggcagcggtgggcgcggaccccggagaggctgccccgagcccgagcaccccctgaccgggcgctcaccacgggtgttgggacaagcagcggagcctgcgggctggagccaggctcggaccctccgcgccggggcgggcggccgagcggacgcagctggcagtggcggcgggagagcgccccggatccgcccggagcccaaccccgtggcacttcggctggctgggcagcggcgctggggacaacgcggggccttctgcaacgagcgcctgcgtgggactccaggggccggcgccccgct

SEQ ID NO: 5182 - DNA, 600 bp, Homo sapiens
aaggagcgtgaggagtgtgcggagcttggcacaccaagttgctgagactgtgacaccagcctccgcccgttccgcgcgggtgcaggcggcgagcctcggctcggacaccacagctctcctgcccgcgccgggcagtcctctgcctgtccagaggcagcactcccggctctcggctggctgtgggtctgtcttgtggggctccagcactagcctgctcggcctcggaaactcctgcagcgtccagaacacagaaaatagactcatctcctaattcgccagggagctcgagggctgcggggccgcggggctgcctcccccgctcctcccccaacccgaccccaccccacccccgccagggcttcggcggcctcccggagtcacacagcctacccccccaccccaacaccccctcccccggcagacaaagggcctgggcaaattcgccgcccggcctcctagcgctccggggaggccgctgcgccccggagtggatcgcgctggaggcgtgcgccgggcgagaagccgcggccgcgggagcgcagtatggggaagaaccgcgagatgcgcctgactcacatctgctgctgctgcctcctttac

SEQ ID NO: 5183 - DNA, 600 bp, Homo sapiens
gacagaggagcgacgcgctctcgcctggattcttttccttttctgcccaggcgagacccacttatttcctggggtcgcgttggagagggctttcacgcccggggtgcggaaaagaagccaaatccaccttcctccactgttggccaccctcctgcaggctcccccagcgccgacttcattttctctcttctctcgctacttcctctctgcctttctttcgttatttttccaccgagtcgccaccgccgcttgcttcctcggaggagcaacgcgactggccagcaaagggtggctctgctccgagcgccaaagttctccccgcctcagccggcgcctccctgttgctgagccctggcgcctgcctgtcgcttggctgcgctaaacgcccactgttggtgagattcccgagtggcacatcccgcgcccctggaaagtcctctcccctcaaaggctgggcgtcatagtttgcaaaattccctaaaacctaagaaggaaaataggactatgagccggtgagaattctgaattcagagtcgcacctgagggatctgaaattcggtggttcactgaaataggttcaaagaggctgtgacttaacga

SEQ ID NO: 5184 - DNA, 600 bp, Homo sapiens
gggtgagagccttcagcggtgcgtcctaaggagcgtgaggagtgtgcggagcttggcacaccaagttgctgagactgtgacaccagcctccgcccgttccgcgcgggtgcaggcggcgagcctcggctcggacaccacagctctcctgcccgcgccgggcagtcctctgcctgtccagaggcagcactcccggctctcggctggctgtgggtctgtcttgtggggctccagcactagcctgctcggcctcggaaactcctgcagcgtccagaacacagaaaatagactcatctcctaattcgccagggagctcgagggctgcggggccgcggggctgcctcccccgctcctcccccaacccgaccccaccccacccccgccagggcttcggcggcctcccggagtcacacagcctacccccccaccccaacaccccctcccccggcagacaaagggcctgggcaaattcgccgcccggcctcctagcgctccggggaggccgctgcgccccggagtggatcgcgctggaggcgtgcgccgggcgagaagccgcggccgcgggagcgcagtatggggaagaaccgcgagatgcgcctgact

SEQ ID NO: 5185 - DNA, 600 bp, Homo sapiens
gtgcggggaccccagcccctcgccctcgtgagcgccgcccctgccacctgctgccaagtcaccggactggggatgcggggggcggggtgcggggagaggaaagcgccgcgggtggcacggtgcctctggcgacagagtagatggacccgaaagagacccgaggtgacttcgggctgggcaggacacccccgggagttgccagcggctctcagcgggcgcctctaggaccccttgtcactgcgagcagcgcctgctctggggaggggctcgaaggcgccgcgccttctcaacgcgccgctgcgtcccccaggggctccaacttggacagctagactggaaatactgctgcacaaagttaggctgagttcgaaggacaccagagaggaagcgcaaggagatgcccttctccggagccgggcagagcgccagaactcctagacgggaaactttcccccattgaagctagaaccggtcatgcgactcggctaagtgtggggaaacactggctctagactccaggtgaacatcgcagggccgaggtgcagaataccaccttggagagagggggtggcatagactggtggcattttggagaagcat

SEQ ID NO: 5186 - DNA, 600 bp, Homo sapiens
cgcccgagagggtttgctggggcagggtggcccctgggacgggttccagacagttctaggcgctcaggtccgcagctgtgctacccccgccgcccgggacgcccggtccccgccagggccctctcactgtagctttaaggagggctggggccgggtgcagcggcacctggagtctcggtggaacccggcagcggtgggcgcggaccccggagaggctgccccgagcccgagcaccccctgaccgggcgctcaccacgggtgttgggacaagcagcggagcctgcgggctggagccaggctcggaccctccgcgccggggcgggcggccgagcggacgcagctggcagtggcggcgggagagcgccccggatccgcccggagcccaaccccgtggcacttcggctggctgggcagcggcgctggggacaacgcggggccttctgcaacgagcgcctgcgtgggactccaggggccggcgccccgctccgctccccccaggcctcaaccccgctggctacccgcgctgaaacctcacctgccgccggctgcaaacggactgcgctccaggtgggtggaaacgtccttctcctactttctggg

SEQ ID NO: 5187 - DNA, 600 bp, Homo sapiens
ttgaacccgggaggcggaggttgtagtgagccgagatcacgccattacactccagcctgggcgacagagcgagactccgtctcaaaaaaaaaaaaaaaaaaaaaaaaaagactttcccctctttgggcctcagtttccctttctgtaaaatgcaggtgaagaggcatgagctcaggattcctaaagccctacggggctgagcaaggacggtgctttgcgtttgcctcccttcccccagcccgcccgagagggtttgctggggcagggtggcccctgggacgggttccagacagttctaggcgctcaggtccgcagctgtgctacccccgccgcccgggacgcccggtccccgccagggccctctcactgtagctttaaggagggctggggccgggtgcagcggcacctggagtctcggtggaacccggcagcggtgggcgcggaccccggagaggctgccccgagcccgagcaccccctgaccgggcgctcaccacgggtgttgggacaagcagcggagcctgcgggctggagccaggctcggaccctccgcgccggggcgggcggccgagcggacgcagctggcagtggcggcgggaga

SEQ ID NO: 5188 - DNA, 600 bp, Homo sapiens
agttcttctttggatcgcccttctctatttgcacactaacatagccaaccttccccagagctggccctccgcccccagctccttggcctgggtcacaccagggtcccggtcggatttagccgggctgctccgggtcgggtgaggcactgggtgcgtgtgggagtcttctcttctgtctcttcgaaagactagggaaatgaacaccgttctgggcttgactttgtccctgctgggaatatcccagttcctggctttggaaatctcaggcaaataattgattcttaatgcacacttaggagacgtcggtagtacgctcgagagcctctctgtcccagagtggctgagagcacgcgccagacacaggttggctcggcccgaagcgaatttgggactctcgtcgcggtgtcctattaattagcttttcccggcgcctcagggactccggggtgaagatggagaggtggcataatggcgggacttgaagtcgttgtggcagggacctggcagcgttgttttctcgggttttgaaccggtgtggagaagtaacttcagctgctgagttggggccgccctggctgcgcggtggcggaggaggagagg

SEQ ID NO: 5189 - DNA, 600 bp, Homo sapiens
gaggagcgacgcgctctcgcctggattcttttccttttctgcccaggcgagacccacttatttcctggggtcgcgttggagagggctttcacgcccggggtgcggaaaagaagccaaatccaccttcctccactgttggccaccctcctgcaggctcccccagcgccgacttcattttctctcttctctcgctacttcctctctgcctttctttcgttatttttccaccgagtcgccaccgccgcttgcttcctcggaggagcaacgcgactggccagcaaagggtggctctgctccgagcgccaaagttctccccgcctcagccggcgcctccctgttgctgagccctggcgcctgcctgtcgcttggctgcgctaaacgcccactgttggtgagattcccgagtggcacatcccgcgcccctggaaagtcctctcccctcaaaggctgggcgtcatagtttgcaaaattccctaaaacctaagaaggaaaataggactatgagccggtgagaattctgaattcagagtcgcacctgagggatctgaaattcggtggttcactgaaataggttcaaagaggctgtgacttaacgagctt

SEQ ID NO: 5190 - DNA, 600 bp, Homo sapiens
cggctctgcccgcggctgagccccgcacaccgcgccgctgtccttggggtcccggcacacggcgttccctccccgcccccgccatccactcccaccgcctctccagtccctgtgccgtctccaccgccctctgactcccgcaccgagctgcgtctccgccgccggcctctctcagcgcggcccggcctcctctttgtctttgaagctcccccgccgaggcccgcgcgcggctcccctctccgtccctctccggcccttgggcgcccagtcggaggtcggggcgggatggggcacgagtctcggggcggcccgcgctccccctactagtcccctcattgcctcggccccgtccccgcagcctcggggcgggagggcgcaggggtccccgggcgccctgggagcccatctccctcaggtccgcgccggtgtcagccgccggcggggggcgggtggagattaagatgagtgctgcgagggacggggccgagggttttgtgtagaaggagagcaggattagtggagagaaagtgctgacccggggtcagccgcaagtcaaacccttttacactcagccggcggaacgagcacggctcgggccgg

SEQ ID NO: 5191 - DNA, 600 bp, Homo sapiens
cgcgcggggggcggagaggacgtagcgctcggcccggcgcccgccccctagtgctgcccccactttgagagtaattgagacttgagcgtgactgcggagcctggaggatgcgggctccccgagcgggcttcccctctgcccggcgcgatggagcgggtcggtgagcggaacaaaggcgcctgcccgggggagcgggtcttccgctgaagagcgcgggtggcgcgccgcgacggccgcctgcgggccaaggtgggaggctgtgcggccccaggcgcggcgcgctccgccgtgggcgggcggcgatccctgagtccggcacctgtgcgccgctccctctgtgcctcccgggcagccccgcctgccggcctcggagtccgcggcgccggcggctagaggtccagaggcgaaccacttgctggtgcagaagagaaaccctcaaatccctggcctttcgcggagacgcctggacggggccgtgcgccgtggactgagcaggcgtctcggggagcacttctgcagagcgaggacttccatgtgagcgattccgttctccccaccaccaatccgacctcccagccgtctccgccgcccgagcatcct

SEQ ID NO: 5192 - DNA, 600 bp, Homo sapiens
ctccgcgcggggggcggagaggacgtagcgctcggcccggcgcccgccccctagtgctgcccccactttgagagtaattgagacttgagcgtgactgcggagcctggaggatgcgggctccccgagcgggcttcccctctgcccggcgcgatggagcgggtcggtgagcggaacaaaggcgcctgcccgggggagcgggtcttccgctgaagagcgcgggtggcgcgccgcgacggccgcctgcgggccaaggtgggaggctgtgcggccccaggcgcggcgcgctccgccgtgggcgggcggcgatccctgagtccggcacctgtgcgccgctccctctgtgcctcccgggcagccccgcctgccggcctcggagtccgcggcgccggcggctagaggtccagaggcgaaccacttgctggtgcagaagagaaaccctcaaatccctggcctttcgcggagacgcctggacggggccgtgcgccgtggactgagcaggcgtctcggggagcacttctgcagagcgaggacttccatgtgagcgattccgttctccccaccaccaatccgacctcccagccgtctccgccgcccgagcat

SEQ ID NO: 5193 - DNA, 600 bp, Homo sapiens
ggtggctttgtccgggtcccgctcccgagtcccaggctcctgctgccctccatctcttagcactccccgggggctccgactcgcgccctctccccgttctgccttctcctgatccgctccgctccgtctcctccggccggagcgtgcagcaaccgccatggatgccccagtgccccgagcccgctccagggatagcgctcggtccccgggggccactgagaacaggggacgcactacgaggggcaggggcgtggcaggagccctgcctggccgcccctggtgggaaaagcccctaggggtcgaggccgagcgtggagcggagctggggtgcggcgaggggcagcaggagccgccgccgcagacgcccggggcgcagaggatcaagagccccgcgccggcgaggagcgcgctcagccgggcttgggagccgccgccggcgccaacttttcccatcgcgggagcgaagagcagcggagagaggggtcccagaacgaaggtggcggcacgagctctgcgctggcggctgtggggggccggcgctcaggaccccaactccatccaagttgcgccgcggtgggggcgggcggaggcggcgccggg

SEQ ID NO: 5194 - DNA, 600 bp, Homo sapiens
ggagcgcacggagatgcctagggaggaggtgacggcgccgtccgccgacgggctggagtcgcacaccaccaggcacttgccctccagcacgatgggctccgtgtcgttctgcgcccgcacggggcagcaggcgggcagtagcagcaacagcagggccagcgccacccccaggcaggatccgcagccgcccggctcgcgcagcgccccccggcgcccgggcatcatcagccgcagcccgagtggcccccggccgggcgcctgcatcgggactggtgggaggcggcgcgcgggggtggaggccggcgccggcgcgagcggcgcggaagggcgcgaaggaacgcgcggagctcgcagcagcctccgggggccttcgtccccggctctgacgttcaaggccagggtcgttctcagaagaaaggcgcctgtgaacctgtcagggcacagaacccaaagccttacaccgggaggtggagccaccgggaagaagggggactgggagcaggtgcctgcggctcgggggttctccccgaaggccacccccttggtcccgcgcacagccaacccgctttccgatctggcacaacaggtccggagaaacgc

SEQ ID NO: 5195 - DNA, 600 bp, Homo sapiens
acgcccggcggccccggcttcgcggccaccggcgttgtctccactctcgccgcgggcagtggccagccagtggccggaggagctggcgtcggcgcggagagccgccgtgctggggcgccgggccggaccagagctgctgccccagcagggcggcggcagaggcggtgagatgcaggtggaagccggagggacatcaccggcaggcgagcggcggggccggggcatcccagctcctgccaagcttggcggcgcgaggaggagtcgccgggcgcagcccccaatcacccaggaacgcggggacgcctgggccactgctccggccgatggttccagaggaagccgtccccttgctaagggttcccgggaggaggtgaaggcgccgcgggctggggggtcggcggctgaagacctccggctgcccagcacctccttcgcgctgaccggggactcggcccacaaccaagccatggtgcactggtcgggacacaacagcagcgtgagtacccacccggcggcgggtccgcctgtttcctgacaccgaaggggaatgggggggtgggtgggagcgagggacagatagttgctcgggggtcgaggcgg

SEQ ID NO: 5196 - DNA, 600 bp, Homo sapiens
gatctggatctcagccacctccggggggacccggcccctgccccgcactccacgcgaagggatgccagaccctcggcctcctggacgcacagcgggggctcgcaccccaaccccgggaacaccctggcccctttccctaacgctgcccactgaggcgtcctcaccgtctaccctgttggggtcgctctctgacccccgcgctgcatccccgggaccgacccacctgctgcgcagctaccccaggccggtcccagccgcccggagccccagtgcgcgatggcggccggcaaactgcgcctgcgcactgggcctcaccgcggactacgactcccacaatgccgcgaggctgtgccgcgcaccggggcgagcaagggagccgtgacaggtgacagtgcgcatggccaatcagacgcgagtgtggcctcccggcgtcccgcccactccggcgcctgcgtcattttgggcaccatggcaacgaagtaaacaagcgggtaaataatagacccctgacagccagagacccggagaaacaaagacggtgagaaacggagaaacaaagacaaaaagacgcgcagaccgggagggagagaagcatgaagg

SEQ ID NO: 5197 - DNA, 600 bp, Homo sapiens
ctggccgcccctggtgggaaaagcccctaggggtcgaggccgagcgtggagcggagctggggtgcggcgaggggcagcaggagccgccgccgcagacgcccggggcgcagaggatcaagagccccgcgccggcgaggagcgcgctcagccgggcttgggagccgccgccggcgccaacttttcccatcgcgggagcgaagagcagcggagagaggggtcccagaacgaaggtggcggcacgagctctgcgctggcggctgtggggggccggcgctcaggaccccaactccatccaagttgcgccgcggtgggggcgggcggaggcggcgccgggcaggtggcggccgcttgcccgggctgggcttgtgccgagcgcgggtccggacggagcgagccgccgccgcgcgggggtggagctgagctgaagtcactggcggagcgggcgcgggcgctggcgggcgacgcgggagggagggcaggcgctgccgggactccgggcgccgcgtcccgcggccgagctgcgctgcgcaccgggtctccgggcgctggaggcgccgccggcgacctcccctcggcctcgcaggcgctgccgccgcctct

SEQ ID NO: 5198 - DNA, 600 bp, Homo sapiens
tgcagggcccctcaccgatctggatctcagccacctccggggggacccggcccctgccccgcactccacgcgaagggatgccagaccctcggcctcctggacgcacagcgggggctcgcaccccaaccccgggaacaccctggcccctttccctaacgctgcccactgaggcgtcctcaccgtctaccctgttggggtcgctctctgacccccgcgctgcatccccgggaccgacccacctgctgcgcagctaccccaggccggtcccagccgcccggagccccagtgcgcgatggcggccggcaaactgcgcctgcgcactgggcctcaccgcggactacgactcccacaatgccgcgaggctgtgccgcgcaccggggcgagcaagggagccgtgacaggtgacagtgcgcatggccaatcagacgcgagtgtggcctcccggcgtcccgcccactccggcgcctgcgtcattttgggcaccatggcaacgaagtaaacaagcgggtaaataatagacccctgacagccagagacccggagaaacaaagacggtgagaaacggagaaacaaagacaaaaagacgcgcagaccgggagg

SEQ ID NO: 5199 - DNA, 600 bp, Homo sapiens
tacgaggggcaggggcgtggcaggagccctgcctggccgcccctggtgggaaaagcccctaggggtcgaggccgagcgtggagcggagctggggtgcggcgaggggcagcaggagccgccgccgcagacgcccggggcgcagaggatcaagagccccgcgccggcgaggagcgcgctcagccgggcttgggagccgccgccggcgccaacttttcccatcgcgggagcgaagagcagcggagagaggggtcccagaacgaaggtggcggcacgagctctgcgctggcggctgtggggggccggcgctcaggaccccaactccatccaagttgcgccgcggtgggggcgggcggaggcggcgccgggcaggtggcggccgcttgcccgggctgggcttgtgccgagcgcgggtccggacggagcgagccgccgccgcgcgggggtggagctgagctgaagtcactggcggagcgggcgcgggcgctggcgggcgacgcgggagggagggcaggcgctgccgggactccgggcgccgcgtcccgcggccgagctgcgctgcgcaccgggtctccgggcgctggaggcgccgccggcgacctc

SEQ ID NO: 5200 - DNA, 600 bp, Homo sapiens
cgcgccggacccgcacctcggcgggcgccacacactcggcagcccgagccgcggtagccgcagcgggatggaggcggcgcgcacggagcgccccgcaggcaggccgggggcgccgcttgtccggacggggctcctactcttgtcgacgtgggtcctggccggcgccgagatcacttgggacgcgacaggcggtcccggacgcccggcggccccggcttcgcggccaccggcgttgtctccactctcgccgcgggcagtggccagccagtggccggaggagctggcgtcggcgcggagagccgccgtgctggggcgccgggccggaccagagctgctgccccagcagggcggcggcagaggcggtgagatgcaggtggaagccggagggacatcaccggcaggcgagcggcggggccggggcatcccagctcctgccaagcttggcggcgcgaggaggagtcgccgggcgcagcccccaatcacccaggaacgcggggacgcctgggccactgctccggccgatggttccagaggaagccgtccccttgctaagggttcccgggaggaggtgaaggcgccgcgggctggggggtcggcggc

SEQ ID NO: 5201 - DNA, 600 bp, Homo sapiens
ggcgccgagatcacttgggacgcgacaggcggtcccggacgcccggcggccccggcttcgcggccaccggcgttgtctccactctcgccgcgggcagtggccagccagtggccggaggagctggcgtcggcgcggagagccgccgtgctggggcgccgggccggaccagagctgctgccccagcagggcggcggcagaggcggtgagatgcaggtggaagccggagggacatcaccggcaggcgagcggcggggccggggcatcccagctcctgccaagcttggcggcgcgaggaggagtcgccgggcgcagcccccaatcacccaggaacgcggggacgcctgggccactgctccggccgatggttccagaggaagccgtccccttgctaagggttcccgggaggaggtgaaggcgccgcgggctggggggtcggcggctgaagacctccggctgcccagcacctccttcgcgctgaccggggactcggcccacaaccaagccatggtgcactggtcgggacacaacagcagcgtgagtacccacccggcggcgggtccgcctgtttcctgacaccgaaggggaatgggggggtgggtg

SEQ ID NO: 5202 - DNA, 600 bp, Homo sapiens
cggggcagcaggcgggcagtagcagcaacagcagggccagcgccacccccaggcaggatccgcagccgcccggctcgcgcagcgccccccggcgcccgggcatcatcagccgcagcccgagtggcccccggccgggcgcctgcatcgggactggtgggaggcggcgcgcgggggtggaggccggcgccggcgcgagcggcgcggaagggcgcgaaggaacgcgcggagctcgcagcagcctccgggggccttcgtccccggctctgacgttcaaggccagggtcgttctcagaagaaaggcgcctgtgaacctgtcagggcacagaacccaaagccttacaccgggaggtggagccaccgggaagaagggggactgggagcaggtgcctgcggctcgggggttctccccgaaggccacccccttggtcccgcgcacagccaacccgctttccgatctggcacaacaggtccggagaaacgcccgggcgcagctggcagcgcatccctgaaggctcccgagcagcgcgcggggctgcgacgagggagggggccgcgcttctgcaggtcctcgtcgctaagacgggccccgagaccctcaga

SEQ ID NO: 5203 - DNA, 600 bp, Homo sapiens
gaggggcaggggcgtggcaggagccctgcctggccgcccctggtgggaaaagcccctaggggtcgaggccgagcgtggagcggagctggggtgcggcgaggggcagcaggagccgccgccgcagacgcccggggcgcagaggatcaagagccccgcgccggcgaggagcgcgctcagccgggcttgggagccgccgccggcgccaacttttcccatcgcgggagcgaagagcagcggagagaggggtcccagaacgaaggtggcggcacgagctctgcgctggcggctgtggggggccggcgctcaggaccccaactccatccaagttgcgccgcggtgggggcgggcggaggcggcgccgggcaggtggcggccgcttgcccgggctgggcttgtgccgagcgcgggtccggacggagcgagccgccgccgcgcgggggtggagctgagctgaagtcactggcggagcgggcgcgggcgctggcgggcgacgcgggagggagggcaggcgctgccgggactccgggcgccgcgtcccgcggccgagctgcgctgcgcaccgggtctccgggcgctggaggcgccgccggcgacctcccc

SEQ ID NO: 5204 - DNA, 600 bp, Homo sapiens
caagagaaaaggcacaaaaaccctattgagaggccccggccgctcctggcgtagtccatcacatggcaatagtcctatttaagccgcgccgccggcgcctttcagcaccactagcgctggccagcaccccgcgctctttgggcggtgcccacggcagcagaggctactgtttcagcctaggtctcagccgcgcgttcagcctcctgggcagaggcagctgcgggataccgcggccagggaaagcgcgtggagagccgaaaggtgcggtgggcgcagagggcgggctggctgcggggcgaccgcgcgccggggccatgccgcgctccttcctggtggactcgctagtgctgcgcgaggcgggcgagaagaaggcgcccgagggcagcccgccgccgctcttcccctacgctgtgcccccgccgcacgcgctgcacggtctctcgcctggcgcctgccacgcgcgcaaggctgggctgctgtgcgtgtgcccgctctgcgtcaccgcctcgcagctgcatgggccccccgggccgcccgcgctgcctctactcaaggcttccttcccacccttcggctcgcagtactgccacgcgcccctgg

SEQ ID NO: 5205 - DNA, 600 bp, Homo sapiens
aacctgaggtcagagctgaggcgtaggggccggggtaggggcagaggtgccgaaacgcactagctggggactcccgggggaaggagataggagagacccaaggcgagccttaggactcgcccctatgactatgactacgcgctgcgtccgaaccacatgtccaccccgcatttgccttcggggaccagaccgcgctccctcagatggctggggagggagcagactccgggtgaaggctgggggaggtaccgggatgccgagtacgccagagcaggcgggggatgggttccggcttcctgccgcctcggcatctcgctttgcaccgggcaaagaaggggccacgaccggcgaagagcgcgtggagacacagggacccgcgatccaggggcaggaaccccgccccctcccggaaacctcccgggccctgagtcgtgcccggcgctccccaccccaccccacccccgccgcccctgccgtcactcacggccgctgcgggctggctagcgtgtgcgctctccgcgccgcaggcacctgctcgctgggcgctgtgcgctcacttctccctcgcgcactgcagactcccggcgctgccgccgccac

SEQ ID NO: 5206 - DNA, 598 bp, Homo sapiens
ttacctgggatcagcagggagcccgggcgcgccgcggcgtggggactaggctcgggcgcgcgtcctcggcggcggtgcgcaggagactcgggcgtggggaggaagccgcagcccagggctgctcgccgctgttccccccgccccctgttgcaggagacaccgaggctccgcggagctgcggcgggggcccacgcccagagaccgtgcgaggaaagccaacctcgtcctgcctgccctcccagccgcgggggagggggccaccgcagtacttcaggacagttacatgggcacagcctcctccgtcctggcgcagggtcaggctccgcggacgacgcctggagacagctgccaatgccaatagctttagccctttattcccacttagatgatggcctggcctctccagacccctctcccctcccagacatcccctgtgagaaaggagggagagggtgttcctgaccttcaggtgagttatttattggctagggactgcagtattttttttttctttttggaaagaaaataaaatcaagttggtggtgtcttcaagtcatgttaatagagaagatctgaattaatgcttgataagagaagt

SEQ ID NO: 5207 - DNA, 600 bp, Homo sapiens
tgccccaccccaacctgaggtcagagctgaggcgtaggggccggggtaggggcagaggtgccgaaacgcactagctggggactcccgggggaaggagataggagagacccaaggcgagccttaggactcgcccctatgactatgactacgcgctgcgtccgaaccacatgtccaccccgcatttgccttcggggaccagaccgcgctccctcagatggctggggagggagcagactccgggtgaaggctgggggaggtaccgggatgccgagtacgccagagcaggcgggggatgggttccggcttcctgccgcctcggcatctcgctttgcaccgggcaaagaaggggccacgaccggcgaagagcgcgtggagacacagggacccgcgatccaggggcaggaaccccgccccctcccggaaacctcccgggccctgagtcgtgcccggcgctccccaccccaccccacccccgccgcccctgccgtcactcacggccgctgcgggctggctagcgtgtgcgctctccgcgccgcaggcacctgctcgctgggcgctgtgcgctcacttctccctcgcgcactgcagactcccggcgct

SEQ ID NO: 5208 - DNA, 600 bp, Homo sapiens
cgggcgcgccgcggcgtggggactaggctcgggcgcgcgtcctcggcggcggtgcgcaggagactcgggcgtggggaggaagccgcagcccagggctgctcgccgctgttccccccgccccctgttgcaggagacaccgaggctccgcggagctgcggcgggggcccacgcccagagaccgtgcgaggaaagccaacctcgtcctgcctgccctcccagccgcgggggagggggccaccgcagtacttcaggacagttacatgggcacagcctcctccgtcctggcgcagggtcaggctccgcggacgacgcctggagacagctgccaatgccaatagctttagccctttattcccacttagatgatggcctggcctctccagacccctctcccctcccagacatcccctgtgagaaaggagggagagggtgttcctgaccttcaggtgagttatttattggctagggactgcagtattttttttttctttttggaaagaaaataaaatcaagttggtggtgtcttcaagtcatgttaatagagaagatctgaattaatgcttgataagagaagtcgcccatttttcagcaactcagcta

SEQ ID NO: 5209 - DNA, 600 bp, Homo sapiens
aggggaaaaggtgggtgcacagcgggttctcagagggtgctcctgagccccctggagctccgggtactcggccggccggcggccactcggcagcgctgcgggctgccgggaactgttctccgctcggggtgctgaaagcggacgcgggagagcgcgcagagaaggcgaggagccgggtcggccaggctctcctgcaggcgcgggtcctgctcgcggggcgtctctagaactcactccttcttcgccgaactctttctcgcttcctgccaggttgcctcatgtctctctctctctgagctgcgaaccccctcctcccagccctgacgtgagcgcctacaccagccgccgccgcagctgccgagcggggcgcgcgccgttctcccagccgcgtgcctgccgagaggccgcgggaccgggcacgcgcgcgcgttcccaggggcctgggagcggcccgagggcggccccgggcggtgcgcgctccccgagcgcgtcctcggggctgcgcgcgcgcggcggcaaggcgaggtgccggcaggcggtggtcgcgctggtgtacaacgcccgcagcagcgcggcgttcaggtgcggcgtcggcgggca

SEQ ID NO: 5210 - DNA, 598 bp, Homo sapiens
gctcccttcttcctctccacttgctctcaatagagggcgcgctgggcgaagtaggggcgtggcaggagccccgctccgcggatccaggttgaaattcctccctcctggaatccgaccgtgagcatttctgagcggtggtgaggaggaggccaccaagacacctccctcccgctgtgcaaaggaacgcaggagcccggcgcaggtggtgggcttaccgcgcgcacgcctggctggagaggtgacgccgctgtctgccaacctttcccagcttttcccacgattggagccaagagaggtccccggggatctcagttgggcaattgtaagggaaggagctcaggacactgacttcaagatgaagggggaggtcagcgaagacagttctagggtgggcggcggccgctgacagagcaggagccacagccaccggggcttggagataggagcaagtcgcaggcggagggggctgcgggctggctgcctgggcagcacaggacttgagggagctgcggggactcctggagtctcatcaggccttccagtcgctgtggggaccccggctgcgcgcggatcgcctgcgccactgtccccactgacc

SEQ ID NO: 5211 - DNA, 600 bp, Homo sapiens
gggctcctggggtcccgacccccggcgcacttgccgcacatacccgctgccagaggcgagggagcgaggtgccctggcagattcgagcggccacccccagccgctgagccgagcttctgctgccgccgctgccgctgcgctcccagccgctgcctgcgccctccctgccgccccctcgggtgcgggctccagcccccgcgctggggagccggcgagcgtgaggcgcgggccaggggctgcgggcgcaggaccccagccccggatcacctgggctcgccgcgcatcgtccttctccccaaccgagccggactccacgggctcaacagcccccagccccggtggtccccgctgccctgcccgctgccgcccccactgggcgccagggacagcgggggtgccgctctgccggcagggcgcacaggggagtgggcacagaggcgggctggagcgatctcacccgttccgggctggccagcacgcgccctccctggccggagcgctgctcatctgatggagggcaggaaggagccctgggctgactgcaggctcctgggtgaccttggacaagttggttagcctctctgagtgcccacttcctct

SEQ ID NO: 5212 - DNA, 600 bp, Homo sapiens
gcggtttcggagggagctgggctgtggagggagggcggcctcttcaccagcgtcgtccgaccaccccgcgccctcctggtggctctcccacgccccattcgcaccccaggtcctcggggtgtctctggtgttgcttcaagttaggcaagaggagctgggggcgcggggagcccggcgccgcagcgcgtgcgtggctggggcgccccggggccggctgcaccttcagtcgccccctggccggcctgcctgcctcgacctccgcatccccttgcaccgtccgctcgcgtgctgcggggcactcgcagcactaccttcggtggggccgcagcaccctgagctcccgggactcccccaccgcccccgcacccacgacccgcgtggtcccagcccctccaccctcttcacgcaccctcgcacccttttgtgcgaccccgtgccctctccgggctgccaacccctgccacccaggtgccagtcccgggcgcggggaggaggccggtggggaagggggcggaggggccggggtggaggaggagctgcgcgaggggcctgggggcggggagcgaggagagcgctcggaatgtgtgccggtctctaggt

SEQ ID NO: 5213 - DNA, 600 bp, Homo sapiens
cccaggtcctcggggtgtctctggtgttgcttcaagttaggcaagaggagctgggggcgcggggagcccggcgccgcagcgcgtgcgtggctggggcgccccggggccggctgcaccttcagtcgccccctggccggcctgcctgcctcgacctccgcatccccttgcaccgtccgctcgcgtgctgcggggcactcgcagcactaccttcggtggggccgcagcaccctgagctcccgggactcccccaccgcccccgcacccacgacccgcgtggtcccagcccctccaccctcttcacgcaccctcgcacccttttgtgcgaccccgtgccctctccgggctgccaacccctgccacccaggtgccagtcccgggcgcggggaggaggccggtggggaagggggcggaggggccggggtggaggaggagctgcgcgaggggcctgggggcggggagcgaggagagcgctcggaatgtgtgccggtctctaggtggtgccaaattctggggcctaggcatttccctcgctttatgtttttggttttttttcttccttcaatctctttgattaggccgtacgtggctgtggcaaggagt

SEQ ID NO: 5214 - DNA, 600 bp, Homo sapiens
ctcggggtgtctctggtgttgcttcaagttaggcaagaggagctgggggcgcggggagcccggcgccgcagcgcgtgcgtggctggggcgccccggggccggctgcaccttcagtcgccccctggccggcctgcctgcctcgacctccgcatccccttgcaccgtccgctcgcgtgctgcggggcactcgcagcactaccttcggtggggccgcagcaccctgagctcccgggactcccccaccgcccccgcacccacgacccgcgtggtcccagcccctccaccctcttcacgcaccctcgcacccttttgtgcgaccccgtgccctctccgggctgccaacccctgccacccaggtgccagtcccgggcgcggggaggaggccggtggggaagggggcggaggggccggggtggaggaggagctgcgcgaggggcctgggggcggggagcgaggagagcgctcggaatgtgtgccggtctctaggtggtgccaaattctggggcctaggcatttccctcgctttatgtttttggttttttttcttccttcaatctctttgattaggccgtacgtggctgtggcaaggagttggggaaa

SEQ ID NO: 5215 - DNA, 600 bp, Homo sapiens
aatcctacaggtggctgtgacccgggcccctaccgttttcctggaccctccttgcctgctccattttccaagccctccccaattgctgcagactggagtagcccggtcttcactccaatctcgctctcccctctcctctccacttcctctcaagccgagcttggtcatgagttagcgcccatagcgatgtcggagagttcctggggagaggggccaggtgatgggagtgtctgtagggtgggcttgaacagagagggtgtcttttcccttaggggaggaacacccatgctgaagtcccttcgctctgcgcctagcttggcacccctcgggcgtccttagcccgaggtcccagccagccctggagctcgggagagcggcgtgcaccatcccagtttaaccgcgcctgcagtgcccagccgggatgagcacttggcccgaggctgctcaccaggcgcctcctctcccttcccggcgcctactctggcttggaagcgcgggccccaccgagccgcagggaaacctctgcttctttccgacttagaagcctagaccccattttcttggatcctctggactccagcagagggaaatttcgcaact

SEQ ID NO: 5216 - DNA, 600 bp, Homo sapiens
ccgacccccggcgcacttgccgcacatacccgctgccagaggcgagggagcgaggtgccctggcagattcgagcggccacccccagccgctgagccgagcttctgctgccgccgctgccgctgcgctcccagccgctgcctgcgccctccctgccgccccctcgggtgcgggctccagcccccgcgctggggagccggcgagcgtgaggcgcgggccaggggctgcgggcgcaggaccccagccccggatcacctgggctcgccgcgcatcgtccttctccccaaccgagccggactccacgggctcaacagcccccagccccggtggtccccgctgccctgcccgctgccgcccccactgggcgccagggacagcgggggtgccgctctgccggcagggcgcacaggggagtgggcacagaggcgggctggagcgatctcacccgttccgggctggccagcacgcgccctccctggccggagcgctgctcatctgatggagggcaggaaggagccctgggctgactgcaggctcctgggtgaccttggacaagttggttagcctctctgagtgcccacttcctctattcaaatataata

SEQ ID NO: 5217 - DNA, 600 bp, Homo sapiens
cgtccagaacacagaaaatagactcatctcctaattcgccagggagctcgagggctgcggggccgcggggctgcctcccccgctcctcccccaacccgaccccaccccacccccgccagggcttcggcggcctcccggagtcacacagcctacccccccaccccaacaccccctcccccggcagacaaagggcctgggcaaattcgccgcccggcctcctagcgctccggggaggccgctgcgccccggagtggatcgcgctggaggcgtgcgccgggcgagaagccgcggccgcgggagcgcagtatggggaagaaccgcgagatgcgcctgactcacatctgctgctgctgcctcctttaccagctggggttcctgtcgaatgggatcgtttcaggtaagttcttccgtgactttctcgcttcctttccagccatcccagcggagaccgcgaacgtacgggtcggcagggctggtgcaaccggtgcgtggagagcagggctcagtgggtagcaataaaaatgagcttgaggtgcaggttaaggggtcaagttcggaaatgaagcacacttctgccggcctcgttttaaccgtatgtgg

SEQ ID NO: 5218 - DNA, 600 bp, Homo sapiens
cgatggtcccccaaaacctcagcagctgcttaagcaagcggccagatcccaccctgacctgctgtggccagagatctagaaatggggccgaggagaaggacagcttctgaggcctgacttgcaagcagctttcttcgcctcgttctcggggcttcagggaggcggcgactggagccccgctgcctactcacaacaaaagaaagcagggctggcgcccctacacgcgctcccattcactgccggccgcggggagaatcctaccccgcgccctcgccagggtcccggggagctctgggctggcggaggcgaacaagatgcggtttgacagaaccaggccgtgcttctgcaaacctcaatgccgctccgccagccgcggcggcctcccagactccatttgccggggagctccgagccgcgcaaaatctctgcaagctgtgctctgcagaatgcaaagccgggctggaatccgccattcccgccgccccagccgactcggccgacgagctccctcctgagcctcccgggccatctgccgggacggttacctcgttcggtgaagccggtgcattcaccacatcctctgctgctcctagcagggaa

SEQ ID NO: 5219 - DNA, 600 bp, Homo sapiens
tagactcatctcctaattcgccagggagctcgagggctgcggggccgcggggctgcctcccccgctcctcccccaacccgaccccaccccacccccgccagggcttcggcggcctcccggagtcacacagcctacccccccaccccaacaccccctcccccggcagacaaagggcctgggcaaattcgccgcccggcctcctagcgctccggggaggccgctgcgccccggagtggatcgcgctggaggcgtgcgccgggcgagaagccgcggccgcgggagcgcagtatggggaagaaccgcgagatgcgcctgactcacatctgctgctgctgcctcctttaccagctggggttcctgtcgaatgggatcgtttcaggtaagttcttccgtgactttctcgcttcctttccagccatcccagcggagaccgcgaacgtacgggtcggcagggctggtgcaaccggtgcgtggagagcagggctcagtgggtagcaataaaaatgagcttgaggtgcaggttaaggggtcaagttcggaaatgaagcacacttctgccggcctcgttttaaccgtatgtggaatagtttccttctaatt

SEQ ID NO: 5220 - DNA, 600 bp, Homo sapiens
gactcatctcctaattcgccagggagctcgagggctgcggggccgcggggctgcctcccccgctcctcccccaacccgaccccaccccacccccgccagggcttcggcggcctcccggagtcacacagcctacccccccaccccaacaccccctcccccggcagacaaagggcctgggcaaattcgccgcccggcctcctagcgctccggggaggccgctgcgccccggagtggatcgcgctggaggcgtgcgccgggcgagaagccgcggccgcgggagcgcagtatggggaagaaccgcgagatgcgcctgactcacatctgctgctgctgcctcctttaccagctggggttcctgtcgaatgggatcgtttcaggtaagttcttccgtgactttctcgcttcctttccagccatcccagcggagaccgcgaacgtacgggtcggcagggctggtgcaaccggtgcgtggagagcagggctcagtgggtagcaataaaaatgagcttgaggtgcaggttaaggggtcaagttcggaaatgaagcacacttctgccggcctcgttttaaccgtatgtggaatagtttccttctaattag

SEQ ID NO: 5221 - DNA, 600 bp, Homo sapiens
caaggtgggaggctgtgcggccccaggcgcggcgcgctccgccgtgggcgggcggcgatccctgagtccggcacctgtgcgccgctccctctgtgcctcccgggcagccccgcctgccggcctcggagtccgcggcgccggcggctagaggtccagaggcgaaccacttgctggtgcagaagagaaaccctcaaatccctggcctttcgcggagacgcctggacggggccgtgcgccgtggactgagcaggcgtctcggggagcacttctgcagagcgaggacttccatgtgagcgattccgttctccccaccaccaatccgacctcccagccgtctccgccgcccgagcatccttgaggtgggacgagcaggggcttggatccctgccggccgtctggtgtgtgaggcttgcacggcccctggctgccccgcgcctcgccggagcccgagggggcgcaggtccggggcgagggccggccgggctgtttgatggcttcactgagaagagtcaaagtgctgttggtgttgaacttgatcgcggtagccggcttcgtgctcttcctggccaagtgccggcccatcgcggtgcgcagcggaga

SEQ ID NO: 5222 - DNA, 600 bp, Homo sapiens
gaatgtcaagcctccaggttcacaaatggctggaggtgctcggggttagctcccgagggcggcaagcgccgaccggtcctcgctcgctaggcaggcgcctccggattccgttcatgcctctcggagctacagggcttggtgcggagacgcagggcgggcgcgctgggctctgggtgtccgcaacccaaagtgcagctggtgtcttgacgctaccgtctatgcacaagccggcggcggcggcggagcttggaggaggcagggagattccaaataaatccactaattctgggctgagcgctccggcgtgcgagcccgcctgcctgccaaatgtaactgtgaagtgatgtggaaaagtgagccgggtgcctcccctgacggatctcattgggcagagcgcagaggcaggtctaccacttggaaattcatgtaagcagtcccccctccccgccccctccccgccttcccccttcgctctcccgcgctggctcgatcgctctctttccccctacccaagtgggcgcacaacttttcgctcctcgctcccgagcaagccccgcgcgtctctgccgccagagccacgaggtgaagatgcgcccttcc

SEQ ID NO: 5223 - DNA, 600 bp, Homo sapiens
cggcaagcgccgaccggtcctcgctcgctaggcaggcgcctccggattccgttcatgcctctcggagctacagggcttggtgcggagacgcagggcgggcgcgctgggctctgggtgtccgcaacccaaagtgcagctggtgtcttgacgctaccgtctatgcacaagccggcggcggcggcggagcttggaggaggcagggagattccaaataaatccactaattctgggctgagcgctccggcgtgcgagcccgcctgcctgccaaatgtaactgtgaagtgatgtggaaaagtgagccgggtgcctcccctgacggatctcattgggcagagcgcagaggcaggtctaccacttggaaattcatgtaagcagtcccccctccccgccccctccccgccttcccccttcgctctcccgcgctggctcgatcgctctctttccccctacccaagtgggcgcacaacttttcgctcctcgctcccgagcaagccccgcgcgtctctgccgccagagccacgaggtgaagatgcgcccttccgcgcggtgcgcgcagcccgctgaggaccgagctcctggataagtgggctggcagataat

SEQ ID NO: 5224 - DNA, 600 bp, Homo sapiens
tcttgcacacaaagggcgaagagaggggcgtggggaggctggaaagcatggttgccccgcctggcccggcgacgcccgctcagcagcctgctgaggagtggggacgaagagcagcctaaacttagggctcgggatatttcgatgccacccaaattgccgtcctaccccaacgaggcagggaaaggagcggagcgcgcgcgcgagctgagtgagtgcttacgtcgcagcgagatctgtgctgggataattagagaggagttgggctgagccgagtcctctttcagcagcagcagccggagccgccgccgcagcccggtggggcaaccctgactcggaccgctcgggagagccccaggagaggccagcgccgcgcagcagccgccccgctgcgcccacctccccggctgctcccggagggctcacaaaggcggtggccgcccgagtggccttctccatccaggcgttcgcgtcctcctccccaccttctctcccgaaggcgaaaatggcagggccaggcgagaacctgggacagcggtggccctagccctgcgatcctcacccctcctgctaggagaggctgcgggctgcccgcggacgatg

SEQ ID NO: 5225 - DNA, 600 bp, Homo sapiens
caaccacgcccttgagcgctgcggcttcgggaagaaaacagctgctgctgtcaggccaggcctggctccgcagcccggagggccaccaggcggctggcataggccggggaggggctgggatcggtggctgcgatgccctgtagagccgagggaaggcgcgagtgcacgttagagtgacaatattggccggaccgagccccaatcggggagctcacggccagctgaattcgctgacgtgtaggagaggaaaggaccccgagaacccggaagcctagattcctgccggagctgcaagtgctgcggaaatgggggaagaaggtttctgggcgctttaaacaaatggctgcctcccagcgctctgagttaagggaccggctacctagcgtctagctgaggaggaagacgcgcagctggagaactgttgcctttgtagttgcttctcccgccgcatccaggaaaaacaggcgctttggggctggttagaacaaacaaagccccaattcccgagccctgttgaggctcggacagagaggtttgcgcacaacctgcgcttctgcgcaatcagcggctcctgagcccgggtctccggcaccacctggt

SEQ ID NO: 5226 - DNA, 600 bp, Homo sapiens
tgcacacaaagggcgaagagaggggcgtggggaggctggaaagcatggttgccccgcctggcccggcgacgcccgctcagcagcctgctgaggagtggggacgaagagcagcctaaacttagggctcgggatatttcgatgccacccaaattgccgtcctaccccaacgaggcagggaaaggagcggagcgcgcgcgcgagctgagtgagtgcttacgtcgcagcgagatctgtgctgggataattagagaggagttgggctgagccgagtcctctttcagcagcagcagccggagccgccgccgcagcccggtggggcaaccctgactcggaccgctcgggagagccccaggagaggccagcgccgcgcagcagccgccccgctgcgcccacctccccggctgctcccggagggctcacaaaggcggtggccgcccgagtggccttctccatccaggcgttcgcgtcctcctccccaccttctctcccgaaggcgaaaatggcagggccaggcgagaacctgggacagcggtggccctagccctgcgatcctcacccctcctgctaggagaggctgcgggctgcccgcggacgatgtgg

SEQ ID NO: 5227 - DNA, 600 bp, Homo sapiens
tgggagccgccgccggcgccaacttttcccatcgcgggagcgaagagcagcggagagaggggtcccagaacgaaggtggcggcacgagctctgcgctggcggctgtggggggccggcgctcaggaccccaactccatccaagttgcgccgcggtgggggcgggcggaggcggcgccgggcaggtggcggccgcttgcccgggctgggcttgtgccgagcgcgggtccggacggagcgagccgccgccgcgcgggggtggagctgagctgaagtcactggcggagcgggcgcgggcgctggcgggcgacgcgggagggagggcaggcgctgccgggactccgggcgccgcgtcccgcggccgagctgcgctgcgcaccgggtctccgggcgctggaggcgccgccggcgacctcccctcggcctcgcaggcgctgccgccgcctctccccgccgcccactctgcgcccccgcggccgcgggtcccggcgctgagtccgcgcaccctgcccgcgggggcggtcgaccccgggctcccggagcagtcgatgtgtcgggagcttcctattcctgctttattgtttctatgagtctatgttgctg

SEQ ID NO: 5228 - DNA, 600 bp, Homo sapiens
tccctgcgcaacgcctcctcgtcctccgagattttccaatggtggcgcaagctcctccctcgcccgagctgggcgccgtcctagagccaagcgcccgctagagccgagactagggggcggtgaggagtgggacccgctcgcggccattggttgtgcggccaggaggggcggagggacgacgcgcgggctgtgcggggccggcagcccggatccactcccgctgcgcctgctgtccgccgtgcgcccagactgcgcgccgcgccgctgcgcccaacattcccgaggacggcttcgcgggcgcgtatcgtccagaccggagcaccgccccaccgctagcgcaggagacctgccggggaagtcgcgtgtcctgacctgcaggtcagtgagggaaacttgcagggtcccgagctctgggggtgaacttgccctacgcggagagcgccccactccttgcctggggcggcctcgggtcctggaggcgagccgcctcccagactctcccccgagatctgggctcccggagatgtggctcctttctgagaaacacccccaaatctatcccttttgaggtgtccttactgtcccgagaagcaatcgcag

SEQ ID NO: 5229 - DNA, 600 bp, Homo sapiens
agccgccgccggcgccaacttttcccatcgcgggagcgaagagcagcggagagaggggtcccagaacgaaggtggcggcacgagctctgcgctggcggctgtggggggccggcgctcaggaccccaactccatccaagttgcgccgcggtgggggcgggcggaggcggcgccgggcaggtggcggccgcttgcccgggctgggcttgtgccgagcgcgggtccggacggagcgagccgccgccgcgcgggggtggagctgagctgaagtcactggcggagcgggcgcgggcgctggcgggcgacgcgggagggagggcaggcgctgccgggactccgggcgccgcgtcccgcggccgagctgcgctgcgcaccgggtctccgggcgctggaggcgccgccggcgacctcccctcggcctcgcaggcgctgccgccgcctctccccgccgcccactctgcgcccccgcggccgcgggtcccggcgctgagtccgcgcaccctgcccgcgggggcggtcgaccccgggctcccggagcagtcgatgtgtcgggagcttcctattcctgctttattgtttctatgagtctatgttgctgtttc

SEQ ID NO: 5230 - DNA, 600 bp, Homo sapiens
cgccgccggcgccaacttttcccatcgcgggagcgaagagcagcggagagaggggtcccagaacgaaggtggcggcacgagctctgcgctggcggctgtggggggccggcgctcaggaccccaactccatccaagttgcgccgcggtgggggcgggcggaggcggcgccgggcaggtggcggccgcttgcccgggctgggcttgtgccgagcgcgggtccggacggagcgagccgccgccgcgcgggggtggagctgagctgaagtcactggcggagcgggcgcgggcgctggcgggcgacgcgggagggagggcaggcgctgccgggactccgggcgccgcgtcccgcggccgagctgcgctgcgcaccgggtctccgggcgctggaggcgccgccggcgacctcccctcggcctcgcaggcgctgccgccgcctctccccgccgcccactctgcgcccccgcggccgcgggtcccggcgctgagtccgcgcaccctgcccgcgggggcggtcgaccccgggctcccggagcagtcgatgtgtcgggagcttcctattcctgctttattgtttctatgagtctatgttgctgtttcctt

SEQ ID NO: 5231 - DNA, 600 bp, Homo sapiens
cagcgcgcagctaaagggtttggaggtgaaaaggagggctgggtggggaggagagaaagtgagaagggagagaaaagcggcggctgagcaaagcgggagccggcgcgggcggtggggcctgacccggacgccgcgcacccggctccgccccgcgcccagcgccccgctcactccctggccgcgcctgccttcgcgcccctctgttttctctcacttaccagcagctctgctgacaagcgagaaaactgacaagtgagaaaagtcgtctgtcagcgcccgggctggtgtctgggctgtcaccgcgggcgcggagggaggggcgcgcgggcaccgccgtctgccgggcacacgctgggctccgaccccggccgggcacactcacccccgcagggcagccgcggccaccaccgacctgcggagctgcgtgggcttccggaaccctcacctcaacaagagctcggctccgcgcgcaagtaggagggaagggaaatccttatcctcccggggccagggcacgcagaagccgcgaggcttcgcggaggttgggcctggaggtcccccacagcctcactctcgcacccgccacagaaccggatccat

SEQ ID NO: 5232 - DNA, 600 bp, Homo sapiens
ccaggagaccagggtaccgggtcgcgtgtccgccgccgccgcccgctggaatccagggctgcacgcgtgaccgcggcggcggcggcgctggcgaggggaagggggagggggcgctccctcgcgcaccagattatttttggctccgcagccggggctgctcgctgcttgtcgcgcgctcacacacacacagacacacacgcacacacacacatgcacacattttctcgcgctctctccggctctcctttgtttattttctaatctatatttttactggaagatttcctctttattctctcccgccctcctacaagcgctcttgctggccgtctgggtgcacacaccgctccctcgatcaccccagcccccttcctggtctcccgagcgcggggtttgaaggtcacctcctttccagtccccgtgcgagccgcgctgccgccgcctcctccagccagagtcggtgggactggctgcgctgccctgaagtggttctccaagcagcgcggagggtggcggacggcggacggagcccaggggccgcgtcgggtggggaaacccgaactcgcggaggggaatccctccccctccgccccagccccc

SEQ ID NO: 5233 - DNA, 600 bp, Homo sapiens
ccaaacaaagccacagaagcgatcagcgcgcagctaaagggtttggaggtgaaaaggagggctgggtggggaggagagaaagtgagaagggagagaaaagcggcggctgagcaaagcgggagccggcgcgggcggtggggcctgacccggacgccgcgcacccggctccgccccgcgcccagcgccccgctcactccctggccgcgcctgccttcgcgcccctctgttttctctcacttaccagcagctctgctgacaagcgagaaaactgacaagtgagaaaagtcgtctgtcagcgcccgggctggtgtctgggctgtcaccgcgggcgcggagggaggggcgcgcgggcaccgccgtctgccgggcacacgctgggctccgaccccggccgggcacactcacccccgcagggcagccgcggccaccaccgacctgcggagctgcgtgggcttccggaaccctcacctcaacaagagctcggctccgcgcgcaagtaggagggaagggaaatccttatcctcccggggccagggcacgcagaagccgcgaggcttcgcggaggttgggcctggaggtcccccacagcctcactctcgc

SEQ ID NO: 5234 - DNA, 600 bp, Homo sapiens
ccgggtgcaagcgaccccctgccccttgcgcccccgccgtgtggtcctgggagtgcgatgcgtcttaggcgcgcgcgattcctcgaaacccggcgcagtcgcgacctctccggctgactggtccgggagtcccgggagctccagcagggccagcgttccccaacgggctgagccgctcgtccccgcgacctgcatgtcccactcgggccccgcgcccccacttagccgctgaaggcgtctcgcggtgactttaccttgcctggggtggaagtcaacttcccaagacctggtgatgaagagcgagagatggtagagcagcccagtcagccacttggccacccacatggttccaccctggggaccccgatcggggaggcccaccagagccgccggcagccaagccggcttccctcgcgctccgatccctctcctccctctcgcccgccgctctccgcgcctcagcagcctagggaacagcagcgcgggccctgggccggctggtccagccacaccgcctgtctccgctcgctgagccgctgcttcatcgcactgcagcctcaccccccttcctgcgcccgcgctgccctcagaaactctctg

SEQ ID NO: 5235 - DNA, 600 bp, Homo sapiens
cgcgccgacgcatgcgaacttcccggttccgggggagctcggggtgagggcagccgaagcgaggggtgcggcgggggcctcggcgggggctcggatcccatcaacagcgcctctgcgggtgccgagccgcccctaatccagaagggcgctcccagctgggcgccgggatccgggcaagttaggctggtcccgagtcccgaatctcccaccccggaccccccagacccagagctgccccgcggatgaggagggggcgtggctgagggacacggtgtttgttccccatccctgagttccgtgcggacctgccccagccccagcacagtcaccctgtggaactggcatccaggagaggtgctccgctctgtgcgctccttcctcccggctgtgtgctccctgtccacagctccccatccacagcttcggcactgtggggctggtgctccaggagggaaggcccggttctttgcatcccctttccgcaaccgctagggtctctgtgcgggccctagaggaacgctcactcatcgcgcagctcaccagggaccccagcttggcagaaaccaggggctctctgcgggttctctcaaatgagtcctt

SEQ ID NO: 5236 - DNA, 600 bp, Homo sapiens
ttctccccctacccccaaacaaagccacagaagcgatcagcgcgcagctaaagggtttggaggtgaaaaggagggctgggtggggaggagagaaagtgagaagggagagaaaagcggcggctgagcaaagcgggagccggcgcgggcggtggggcctgacccggacgccgcgcacccggctccgccccgcgcccagcgccccgctcactccctggccgcgcctgccttcgcgcccctctgttttctctcacttaccagcagctctgctgacaagcgagaaaactgacaagtgagaaaagtcgtctgtcagcgcccgggctggtgtctgggctgtcaccgcgggcgcggagggaggggcgcgcgggcaccgccgtctgccgggcacacgctgggctccgaccccggccgggcacactcacccccgcagggcagccgcggccaccaccgacctgcggagctgcgtgggcttccggaaccctcacctcaacaagagctcggctccgcgcgcaagtaggagggaagggaaatccttatcctcccggggccagggcacgcagaagccgcgaggcttcgcggaggttgggcctggaggtcccccac

SEQ ID NO: 5237 - DNA, 600 bp, Homo sapiens
cgggcttgggagccgccgccggcgccaacttttcccatcgcgggagcgaagagcagcggagagaggggtcccagaacgaaggtggcggcacgagctctgcgctggcggctgtggggggccggcgctcaggaccccaactccatccaagttgcgccgcggtgggggcgggcggaggcggcgccgggcaggtggcggccgcttgcccgggctgggcttgtgccgagcgcgggtccggacggagcgagccgccgccgcgcgggggtggagctgagctgaagtcactggcggagcgggcgcgggcgctggcgggcgacgcgggagggagggcaggcgctgccgggactccgggcgccgcgtcccgcggccgagctgcgctgcgcaccgggtctccgggcgctggaggcgccgccggcgacctcccctcggcctcgcaggcgctgccgccgcctctccccgccgcccactctgcgcccccgcggccgcgggtcccggcgctgagtccgcgcaccctgcccgcgggggcggtcgaccccgggctcccggagcagtcgatgtgtcgggagcttcctattcctgctttattgtttctatgagtctatg

SEQ ID NO: 5238 - DNA, 600 bp, Homo sapiens
tcgggatcggcgcctcctaggtgcgggctgtgcgggcagtcctgctcccgcccccggggctgagctggcggcgtcggcttcagagcctcggagccgagccgagtccggggaagcgctcctttctcagctccagccgaagagccgcccggcagggagaggcggagtcactggcgcccggggcggggtgttggggaggggtgagtagggacaggagggagggggtggagagttgggctgctgcgacgcctcccggtggctctggcggcaccaatgcggggcaccggagcaggtgtccgactgcggtgcgggctaccactccgccggggaacctcgtcttgctcctccctgcgcttcgcctctggaatctctcccttatctcatgccgcggtgaaactttgctcaagttggtggtgctctgaggtctccagggctggaggccgcgcgacgcgaatcgccgacactggattctcgggcgttagtccgaagtttaagttcccttcgttcactcctttgccctggatcgaaccgcagccccaggacgcagcgggttccactggaaacggggaatcggggagaggcggtcgctgggctccgggcgac

SEQ ID NO: 5239 - DNA, 600 bp, Homo sapiens
cgacgcctcagctcatttgttaattagcagtaattgcccgggtcagtgacacctcctacttgagcctctttccctgtccataaaatgcactaatactggggtgggtgggattgggaggtgggtcctggagctccatccaatcagtggcactggtgtaggaaccgcccgatcaggcgcgcagttggagaggagggcgtggcttccggcatttggcggggtctttgtctctcgctcccgccagagcttgggatcggtcttcactgttccgcgtcctctacctgggaaccaccgacccccgcccggcgactttgtcacagactctgttgccctgtgatctgcaggtcctgggagacgcacagccaagatgccagggcaccctggaagctgtgaagtggtgcgtatgcggggttgggcatcccttgaggcgagagcgggctgtgaaacctgcaggaccggcctccccacagtccgctcccgggtccgccgacctcagtcctctctggcgcagctcggccccaggcgtctctggccgcaagatggcggctgggcccgcggccgggacccccagcgtctcgccgcgtccctgctgggcgccctgtc

SEQ ID NO: 5240 - DNA, 600 bp, Homo sapiens
cctttgggaaaccttaaaagcctggacttggatcgcatccctcctttcttcgaaactctccatggcttctagcgtcttcacagcgaatacacagcccccagcctgctcttccaggagaagcttcgcctcacacgttgttccctacaggcgcctgtggaccccaggttccatcctcccgggtctgtcctccaggccatagcccgcgccggtccctgtgcctgtcgctctccccaccgcatcccacaggtgtcagaaacaaggacctctcccgcgaacgcctcagtgtcccgacgccgggtccgggctgcagacctgtgaacagtcgccgctctctcgctgcttcaggattcgggttaggatgaggtgacctgagggcagggaaggcacaattacctgagccgggagcctcagcgcggccgccgccatcccgagtacgcggggaaagcactgccgggagcggcgggcgccgttacggggcctaagatctgcctctgtgcagcaagaaggactcttcaccttctgggttcagacaccgcggttcggacccatagctccagcgcctctcacctcacaaaccgcagaaacacacccaacattaac

SEQ ID NO: 5241 - DNA, 600 bp, Homo sapiens
gcgccctgtttcaccaggcccagtcactccagctccagcagcactgagagctcacgaacgccaagggcgagagcgaggtgggggagggcggccggaaatgcgcgcgcggctctctgggaaatggagttaggctcgcgccggcgcagtgtcggctgccggtgccgcggcctttgtctcgcagtcaggagggtgagctaggccggcgaggagggggaggggaggccaggccgggccgggccgggccgggtgcggggggtccggggatcttcctgaggccctggcggggcgagtttccagcagcgcgcgtctgtgtggagtccgttttgctgcccggggcctggggaaggccgtttcggggctggcgggggcaggctttgcggggcatccctagtctgagaggagggcggggcccaacgcccagctggacaggagctgctccgacggcccctgagggaacgcgcgccccgcccctggccccacctctgccccacaccgggcactgggccgccacctttgttgatggaagagagaaactgaggcatagtgcccagggccaggggaccgcaaccacccggcccttgtcactgtagcgttaaggct

SEQ ID NO: 5242 - DNA, 600 bp, Homo sapiens
ctggggagccaccgccggcgccaacttttgccatcccgggagccatagcggcagagagggggtcccggacccgaggtggcagcgaggggctctgctttggcagctgtcggggctggagctcaggaccccaactccagccaagtcgggccgcggcggggcaggcgtaggctgcgcaggcaggggtggccgcgggtgctgagccagtcgccgccgcgcaggcgggcgctggagtctcagctacctggcgcgaccgccagcagcacccagcgcggggccgggagctgctgggggcccaggctccgctctccccaccgctctgcaccgctgccggctgcggacagacccgatgcgccaccaccaccgcagttgccacgacccccatggaatcgctggcgcctccgctccggttctctaacccggcgcactctgggatcccaaagcttgccgtgggttggaggcttcctactctttgtgcgttgaggctttgacctgacccagagcgcagcttatgccctggcttgggcagaaaataatattaattactgatcctttgtgctcccggtcctggcttcctaaagcactcctctctcattcagcacc

SEQ ID NO: 5243 - DNA, 600 bp, Homo sapiens
tctgtctctactgagaacgcagcgcgtcagggccgagctcttcactggcctgctccgcgctcttcaatgccagcgccaggcgctcaccctgcagagcgtcccgcctctcaaagaggggtgtgacccgcgagtttagataggaggttcctgccgtggggaacaccccgccgccctcggagctttttctgtggcgcagcttctccgcccgagccgcgcgcggagctgccgggggctccttagcacccgggcgccggggccctcgcccttccgcagccttcactccagccctctgctcccgcacgccatgaagtcgccgttctaccgctgccagaacaccacctctgtggaaaaaggcaactcggcggtgatgggcggggtgctcttcagcaccggcctcctgggcaacctgctggccctggggctgctggcgcgctcggggctggggtggtgctcgcggcgtccactgcgcccgctgccctcggtcttctacatgctggtgtgtggcctgacggtcaccgacttgctgggcaagtgcctcctaagcccggtggtgctggctgcctacgctcagaaccggagtctgcgggtgcttgcgcccgc

SEQ ID NO: 5244 - DNA, 600 bp, Homo sapiens
gtggggattttgtctgcttgttcactgctgtgtgcccagggcccacgacagtgcccgatacagcaggcgctcaataagtggcgaatgaaagacagggcaaggcggagagagaagaaacagaaagggaaagagaaagcccgggccgccagagcgcttaatcacacgtacatcctaccgggcccctctccagctggctcaggctccacactggtcctccagctcccttttctcagcgatggactcacagccccacccggagcgctggagcgcggacgcggtcactgcgcgtgcgcctcaccgcgctggcaccccggcctggcagcctttggggacctgaaccagctgcgcctgcgcaggtggaacgggtggaacgggtgggggagcggacagtcgaacggcctgagagggctcagctggtccgggtgggattctgaaggccagcggaggtgggcttactagggaaaggggcgcagcagtaactacccgcaactgagcggcgggatctgcggccgcccggggccctcggccaacatcccagcatcctctgcgccgcgccggccccggactccatttcccagcggcccctgcggcctgccctag

SEQ ID NO: 5245 - DNA, 600 bp, Homo sapiens
cgcgcctccggcagtctcagatcccgctcccaggtccctccgcctggcatcctctgcccgcccggtcactgcgctgagcaggcaggcgggcgggccggcgcctgtcacccgcagctggagcgcccgttccctgcccgccccatctgcagggcgcctcgggcactgcgtccggccccgcgaggcggccgggatgagaagcagccggagttcctcgggggcagcagtgacagaggagcgacgcgctctcgcctggattcttttccttttctgcccaggcgagacccacttatttcctggggtcgcgttggagagggctttcacgcccggggtgcggaaaagaagccaaatccaccttcctccactgttggccaccctcctgcaggctcccccagcgccgacttcattttctctcttctctcgctacttcctctctgcctttctttcgttatttttccaccgagtcgccaccgccgcttgcttcctcggaggagcaacgcgactggccagcaaagggtggctctgctccgagcgccaaagttctccccgcctcagccggcgcctccctgttgctgagccctggcgcctgcctgtcgcttggct

SEQ ID NO: 5246 - DNA, 598 bp, Homo sapiens
actcataaaagatgtaagaggaggagaaagttggcaagaagtggatgctttcatctgcagagaaaggcccctgagccctaaaaaaactgccctcctccccactcccccctcctccccccgacacacaaaaaagttcacccactacacctgccttccccagatgggctccctgcgcaacgcctcctcgtcctccgagattttccaatggtggcgcaagctcctccctcgcccgagctgggcgccgtcctagagccaagcgcccgctagagccgagactagggggcggtgaggagtgggacccgctcgcggccattggttgtgcggccaggaggggcggagggacgacgcgcgggctgtgcggggccggcagcccggatccactcccgctgcgcctgctgtccgccgtgcgcccagactgcgcgccgcgccgctgcgcccaacattcccgaggacggcttcgcgggcgcgtatcgtccagaccggagcaccgccccaccgctagcgcaggagacctgccggggaagtcgcgtgtcctgacctgcaggtcagtgagggaaacttgcagggtcccgagctctgggggtgaacttgccctacg

SEQ ID NO: 5247 - DNA, 600 bp, Homo sapiens
agagtctgtctctactgagaacgcagcgcgtcagggccgagctcttcactggcctgctccgcgctcttcaatgccagcgccaggcgctcaccctgcagagcgtcccgcctctcaaagaggggtgtgacccgcgagtttagataggaggttcctgccgtggggaacaccccgccgccctcggagctttttctgtggcgcagcttctccgcccgagccgcgcgcggagctgccgggggctccttagcacccgggcgccggggccctcgcccttccgcagccttcactccagccctctgctcccgcacgccatgaagtcgccgttctaccgctgccagaacaccacctctgtggaaaaaggcaactcggcggtgatgggcggggtgctcttcagcaccggcctcctgggcaacctgctggccctggggctgctggcgcgctcggggctggggtggtgctcgcggcgtccactgcgcccgctgccctcggtcttctacatgctggtgtgtggcctgacggtcaccgacttgctgggcaagtgcctcctaagcccggtggtgctggctgcctacgctcagaaccggagtctgcgggtgcttgcgc

SEQ ID NO: 5248 - DNA, 600 bp, Homo sapiens
tccggcacagcaattaacattggtccaaacggtgtcagtgaactttagctgcaaagaaactacctcatttaaaatttaagcagaccacagggagtagcattggaggaaagagaggagattttctccttcaacattttgagcatactggaatgccaaccccctaggtaggtgccagggccaccacaggaacctgactcgcaggagtcgtcctccgtctctacgcgaagcgccccctcgaggtgggcagggggtggcggcggcgacggtggcggagccgcagagcgagctagagagcgagagcggtgagactctgcggacgtcttcccgcccgccgcgctccgccccacccagcctccgcagcctcgggccggatcgcccggcggggaagatgcgcctcaagaaccaggtagaagcgcctcggcgcaggccccgcacccccgactctgcccgccctctgttacggacacccgctgggccacgtggtcgcgactggcttctcccagcggccagcctggccaccccgactcccagggagggggagagggcccttgcaagaggatcctgcccccgcgctgcccagacctgagggctcctggcgac

SEQ ID NO: 5249 - DNA, 600 bp, Homo sapiens
gcgttggagagggctttcacgcccggggtgcggaaaagaagccaaatccaccttcctccactgttggccaccctcctgcaggctcccccagcgccgacttcattttctctcttctctcgctacttcctctctgcctttctttcgttatttttccaccgagtcgccaccgccgcttgcttcctcggaggagcaacgcgactggccagcaaagggtggctctgctccgagcgccaaagttctccccgcctcagccggcgcctccctgttgctgagccctggcgcctgcctgtcgcttggctgcgctaaacgcccactgttggtgagattcccgagtggcacatcccgcgcccctggaaagtcctctcccctcaaaggctgggcgtcatagtttgcaaaattccctaaaacctaagaaggaaaataggactatgagccggtgagaattctgaattcagagtcgcacctgagggatctgaaattcggtggttcactgaaataggttcaaagaggctgtgacttaacgagcttctggatgtgtcgcttttaaggtttttctagctaagggtattaaagtaagaattatttacacatttttatctc

SEQ ID NO: 5250 - DNA, 600 bp, Homo sapiens
agagggctttcacgcccggggtgcggaaaagaagccaaatccaccttcctccactgttggccaccctcctgcaggctcccccagcgccgacttcattttctctcttctctcgctacttcctctctgcctttctttcgttatttttccaccgagtcgccaccgccgcttgcttcctcggaggagcaacgcgactggccagcaaagggtggctctgctccgagcgccaaagttctccccgcctcagccggcgcctccctgttgctgagccctggcgcctgcctgtcgcttggctgcgctaaacgcccactgttggtgagattcccgagtggcacatcccgcgcccctggaaagtcctctcccctcaaaggctgggcgtcatagtttgcaaaattccctaaaacctaagaaggaaaataggactatgagccggtgagaattctgaattcagagtcgcacctgagggatctgaaattcggtggttcactgaaataggttcaaagaggctgtgacttaacgagcttctggatgtgtcgcttttaaggtttttctagctaagggtattaaagtaagaattatttacacatttttatctcctcagct

SEQ ID NO: 5251 - DNA, 600 bp, Homo sapiens
cagcagaagccgcagcttcagaggcagccggagagacctcggagcagagaaggcgccgccgaccctcgcggctgcctggcccgcggctcctacaaaggcgggctagccgcccgccctctcccttgccttcctccccttcttttctgactttccctctttcccttaatcgcctgcttcttcctccgggtggacttacggccaccttgctcctccgcgcttcacctcatcgccccctctttctttcttctgcctctctctctgcgcccccttctctccgtgtcacgctccctcctggttctgcgcgtctacaaacttttgagcagaacacgagcctcggcaaacgagtcccgcagctcctcctgctgctcccgctggttcctgcggcttctgctcagacaccaacgccagacggcgatgcctctcgggtggtgactccagcgcaggaacttgaagaagcgctttgcccgccgtcctacctggcagctctcctggcagcgggaggagttgaagggtaagggagggaaaatcttaccaaagcgaccggctcactcgactgctgattctttcgcttggcatcgcgtcaggggagttagctttcct

SEQ ID NO: 5252 - DNA, 600 bp, Homo sapiens
tcctagtctgggacatacttgtactaaacatatttatattaaaaacaatgttttaacatactactcttggacactgtataaaacggttgcgtgtctggaatgccgtcgttttgccccgcggccccatcgtacatgcgcatccccgcagccgccaccgtctccactttccgcagcagcgtccctgacgctgcgcgacccgttgccaaggcgactggaaccgcggcccgaggtaactggagggcacggcgggggcggggcgctcatcccaggcggcttctgattggcctcggccgcctcgtgcgtcacagccccgcccctgcccgggagtcccgcagcggtgacttgtcaccgacgcccggcgtgatccagcggaccaatggcggccgcccgcggcgcgcagggtgcggggatggggtccgcccgcggcgttgggcgcgctcgccagcccaggggtcgccatgaccgagtggcccaggcccgagcgaagcccgcgcgcggtgagtccgccgcggcccatccgtccctccgcccgccagagcgtccatcgggacgcccacccgggagggtctcggcgccgcgtcggcgggagctggcccggga

SEQ ID NO: 5253 - DNA, 600 bp, Homo sapiens
ttccgtcaccggggaaaggaggtacacacagtcgcgcgcgcacggacacacacacacacgcacgcacgcacacacaccggtggcgagttcgagccccgcggcccctgtccgcccgcgtgcgcccctcgacacagctcgcctcccgccccctgattcctgctgctgccgcccagaggagaaaggaacctctgcctcgaatttccccactgcgccgggcgctgcggagagcggcgagggtgggcgcgaggcggagaacgcgatgaatgagttctcccctcgcctcggagttgtctgagttggcggcgctgcgcccaggcttccggctctcagcgccccacgcgcgcgtggctccccgggctgccacccacgcccgcggccggggccgagccagccacgcagggcagccgaggctccggagctcctgtcccggccccagtccgggtaaaaggagggttgtccccagcggaggcgcacagccgcgcgttctccctgcactctcttcgcggtcccatctgttccccatggcgtctcatccgcaaacccggatccaggcttacctggagaagaacaagatcggtcccctgtttgaggtaaggcgct

SEQ ID NO: 5254 - DNA, 600 bp, Homo sapiens
gaaccagccatggtcccgggctaatgcccagggataagcacagggatagggatagagatagggattgggattggactccagctccaagagaaagcacctcgggtctattcgtattctccccctacccccaaacaaagccacagaagcgatcagcgcgcagctaaagggtttggaggtgaaaaggagggctgggtggggaggagagaaagtgagaagggagagaaaagcggcggctgagcaaagcgggagccggcgcgggcggtggggcctgacccggacgccgcgcacccggctccgccccgcgcccagcgccccgctcactccctggccgcgcctgccttcgcgcccctctgttttctctcacttaccagcagctctgctgacaagcgagaaaactgacaagtgagaaaagtcgtctgtcagcgcccgggctggtgtctgggctgtcaccgcgggcgcggagggaggggcgcgcgggcaccgccgtctgccgggcacacgctgggctccgaccccggccgggcacactcacccccgcagggcagccgcggccaccaccgacctgcggagctgcgtgggcttccggaaccctcacctcaa

SEQ ID NO: 5255 - DNA, 600 bp, Homo sapiens
accagccatggtcccgggctaatgcccagggataagcacagggatagggatagagatagggattgggattggactccagctccaagagaaagcacctcgggtctattcgtattctccccctacccccaaacaaagccacagaagcgatcagcgcgcagctaaagggtttggaggtgaaaaggagggctgggtggggaggagagaaagtgagaagggagagaaaagcggcggctgagcaaagcgggagccggcgcgggcggtggggcctgacccggacgccgcgcacccggctccgccccgcgcccagcgccccgctcactccctggccgcgcctgccttcgcgcccctctgttttctctcacttaccagcagctctgctgacaagcgagaaaactgacaagtgagaaaagtcgtctgtcagcgcccgggctggtgtctgggctgtcaccgcgggcgcggagggaggggcgcgcgggcaccgccgtctgccgggcacacgctgggctccgaccccggccgggcacactcacccccgcagggcagccgcggccaccaccgacctgcggagctgcgtgggcttccggaaccctcacctcaaca

SEQ ID NO: 5256 - DNA, 598 bp, Homo sapiens
gcctgcgtccagaccccctcccgggtgggctcctccgaggacctccgcagccgcgggcgagctgggtgcctgcgagtcgccgccgcagtctgagcctctggtgccccttagcgttggctctcggagttctgagaagggaaaggagacagacactctgggaaaatctggggtcacctcgattccggctcctacgctggatgccgtgggcaagcatcggtctcctttgatctgaagatcctgcccactccgccccttgcccctgccagacccgcgggagcagcaggtggcgtgggtgccagacgctgccggtgcgcaccgagtgcagcgctgccccggctcgccccgggggtcgcgtgggacagcggtttgcggtgtcgccctctctgcggtgctttccaaggaccctcatgccccgcccgggtgcacattcaccacatgggtcttactaggtgacctctttctaagtaaaatgcattgagaaaccaaagggatggggcatccgtatccattttcctttaaggagcgctgtgggtgttggggatgcgggagaagtaggtgttttttaaagagaaaattgcaaaacctcttgggcaggatt

SEQ ID NO: 5257 - DNA, 600 bp, Homo sapiens
ctctcggagttctgagaagggaaaggagacagacactctgggaaaatctggggtcacctcgattccggctcctacgctggatgccgtgggcaagcatcggtctcctttgatctgaagatcctgcccactccgccccttgcccctgccagacccgcgggagcagcaggtggcgtgggtgccagacgctgccggtgcgcaccgagtgcagcgctgccccggctcgccccgggggtcgcgtgggacagcggtttgcggtgtcgccctctctgcggtgctttccaaggaccctcatgccccgcccgggtgcacattcaccacatgggtcttactaggtgacctctttctaagtaaaatgcattgagaaaccaaagggatggggcatccgtatccattttcctttaaggagcgctgtgggtgttggggatgcgggagaagtaggtgttttttaaagagaaaattgcaaaacctcttgggcaggattcgacctactagcctcttctgctgcataataaggtactgtatacactaaattttacccctaaaaattttcagttcttaccaactataggtaatgatcatccaaaagccgcgtcctgtttg

SEQ ID NO: 5258 - DNA, 600 bp, Homo sapiens
tcgcatggccgaggacgctttcgctgcgagtttggggtcgaggggcagttccctcccggagtcattaacttcgtctcctcgtgctcagggaccagcaacttggtgctgcgggcgccagaaagaaaagggtagcgcctcgcggagcgcgcgggggaagagggactgcggcagcgggacgcgagggcgggaggggcgcagcagcggggagccggagcgcagcggaggggagcgctggggggcggggagcgctcgggcagccaccctgtccccgtctggagccccgcgctgcgtctaggagggcgcaacacgcagtccccgcgggggccagagctcggagccccctagtgcatgccccctctcctcgcgccctgccgaggcctcggccctgcctgccgtgccctgggcctggttgtgcccgggggtccccgcgggcagggcgcggggcaggcagggcgcgcgcgccgacgctcttttgtctgataactaatttgagttaatgcgatctttatgtaaagctaacagcggataattgtctattttctcgccaacagtctccatcacaatcacttatctggaaacctgcggttggattaatcgtta

SEQ ID NO: 5259 - DNA, 600 bp, Homo sapiens
tgtggggggcaggcgctcaggaccccaattccctccaagttgggccgcggtgggggcgggtggaggtggcgccgggcagctggcggccgctcgctggggctgggtttgtgccgagcgcgagtctggaaggagcgagccgcagccgcgcgggggtggagccgaactgaagtcactggctgagcaggcacgggcgctggcgggcacgcgggaaggagggcggccgatgccaggtctccgggcgctggaggcgccgccggcgacccccccctaggcctcgcaggcgctgcctccgcctatccccgctgaccactctgcgcccccgcagccgcgggtctccctgcctagtccgcgcaccctgcccgcgggggcggtcgacccgggctcctggagggtggatatgtcggagttgggaaggggcttttctttgccatctgattcccaatgactggacacctctacctggcttttcactcaggctccgtgttctggcctgtgggaaaccctagaaaggtagccctcaaaaataatgttggatcctttgggcctatgtacacacaacatgctcaaaagatgatctgaggcaacaattatcactctcta

SEQ ID NO: 5260 - DNA, 598 bp, Homo sapiens
gaaaccccattgcagttccagcgcggcttcttcccagagcagccgccgccgccgccgcgctcctcacacctgcattgccagcagcagcaacagagccaggacaagccgtgcccgcccttcgcgcccctcccgcaccctcaccaccacccgcacctcgcgcaccagcagccggccagcggcggcagcagcccatgcctccggtgcaacagctgcgcctcctccggtgccccggcggcgggggcgggagataacctgtccctgctgctccgcacctcctcgcccggcggcgccttccggacccgcacctcctcgccgctgtcgggctcgtcctgctgctgctgctgctgctcgtcgcgccggggcagccagctcaatgtgagcgagctgacgccgtccagccatgccagtgcgctccggcagcagtacgcgcagcagtccgcgcagcagtcggcgtccgcctcccagtaccaccagtgccacagcctgcagcccgccgccagccccacgggcagcctcggcagtctgggctccgggcccccgctctcgcaccaccaccaccacccgcacccggcgcaccaccagcaccaccagccccagg

SEQ ID NO: 5261 - DNA, 600 bp, Homo sapiens
ggcggggcacaggacggtagtctaagagtgttcgcatggccgaggacgctttcgctgcgagtttggggtcgaggggcagttccctcccggagtcattaacttcgtctcctcgtgctcagggaccagcaacttggtgctgcgggcgccagaaagaaaagggtagcgcctcgcggagcgcgcgggggaagagggactgcggcagcgggacgcgagggcgggaggggcgcagcagcggggagccggagcgcagcggaggggagcgctggggggcggggagcgctcgggcagccaccctgtccccgtctggagccccgcgctgcgtctaggagggcgcaacacgcagtccccgcgggggccagagctcggagccccctagtgcatgccccctctcctcgcgccctgccgaggcctcggccctgcctgccgtgccctgggcctggttgtgcccgggggtccccgcgggcagggcgcggggcaggcagggcgcgcgcgccgacgctcttttgtctgataactaatttgagttaatgcgatctttatgtaaagctaacagcggataattgtctattttctcgccaacagtctccatcacaatcactt

SEQ ID NO: 5262 - DNA, 600 bp, Homo sapiens
actgatcagctccaaggacagaccgctgggaagggaaaaacggcccacatcgaactggatgccggatggaaacctctctgcgctattagactgcgtccagtacagcagatggcacgagcacgtgcggcgctcagcttaggctctcggaggcagctgagttggaaatcccgacggaaagcacccacaagctcccactctgcgctggcccacccgcgtgcacgcccaccccccacgcgcgtccctggctcagaagcgcacagatgtttactgcttagagccggtaccgctggggagatcgagcgacttgcgcggcgcacagtgcggcgctggcagggctctgggctcccggtcgggggttcgagcggccaagggatgggggtgggggcggggagagtggggggagggcgaaagaccgccgagaggaggggggagtgggtggactaatgatgaaaaagtctcctccatcccagttccttaattaaatgcatggaaagaaccgaggcgagcacatctggtttcaatctacagccctttgatggcatcaaatgttcttttcccagatcagggctggaagttctgggctaactatggccgtttgga

SEQ ID NO: 5263 - DNA, 598 bp, Homo sapiens
gcgagctgttggctgcgaggtgggcgtgcgtgtgctccatgagcgcgcccctcgctccccttgccgcttcgcgcccggcctgccagcccgactctggtcgccggctcggtggtggcggcggcggaggcagcggcagctggagcagcagcgcctctctccccgcaggactggctcctacccttggccgtgatcccctctgctcgctccgcacctgcccgcctggagtcttggctcagccctcccgcagggcgcggggcgcagggtgcggggcgcgctgcgcggggcctcgggaggggctcccggagcccgtctgtgcgcctcccacctcggacccgctccactcccgcctcaaagccggggggctgggacgccgctccccgcagccaatcagcggctgcctggaagcggagtgtgtgtggggtgggagggatgcggaagaggagggggtcccagccgcctcgcttggctccactttcaggggagaagatgcagttagacctgggagccccgaaggaagaccggagtggaaaacaggctatccccaatctccaaccccgagggaggggcgtggtgtgggtaggatctgcctctcccgcag

SEQ ID NO: 5264 - DNA, 600 bp, Homo sapiens
cgtgactgcggagcctggaggatgcgggctccccgagcgggcttcccctctgcccggcgcgatggagcgggtcggtgagcggaacaaaggcgcctgcccgggggagcgggtcttccgctgaagagcgcgggtggcgcgccgcgacggccgcctgcgggccaaggtgggaggctgtgcggccccaggcgcggcgcgctccgccgtgggcgggcggcgatccctgagtccggcacctgtgcgccgctccctctgtgcctcccgggcagccccgcctgccggcctcggagtccgcggcgccggcggctagaggtccagaggcgaaccacttgctggtgcagaagagaaaccctcaaatccctggcctttcgcggagacgcctggacggggccgtgcgccgtggactgagcaggcgtctcggggagcacttctgcagagcgaggacttccatgtgagcgattccgttctccccaccaccaatccgacctcccagccgtctccgccgcccgagcatccttgaggtgggacgagcaggggcttggatccctgccggccgtctggtgtgtgaggcttgcacggcccctggctgccccgcgcctcgcc

SEQ ID NO: 5265 - DNA, 600 bp, Homo sapiens
tgtcccactcgggccccgcgcccccacttagccgctgaaggcgtctcgcggtgactttaccttgcctggggtggaagtcaacttcccaagacctggtgatgaagagcgagagatggtagagcagcccagtcagccacttggccacccacatggttccaccctggggaccccgatcggggaggcccaccagagccgccggcagccaagccggcttccctcgcgctccgatccctctcctccctctcgcccgccgctctccgcgcctcagcagcctagggaacagcagcgcgggccctgggccggctggtccagccacaccgcctgtctccgctcgctgagccgctgcttcatcgcactgcagcctcaccccccttcctgcgcccgcgctgccctcagaaactctctgctcaggttcagctcggcgcggggaagcaactcgacctagcaggaatggtgccaatatagccaccccggaccggcgagcgccgcggagagcccgcccctatgggctgttcccggccaatcagcgggaggcgcggcccctgctcgcttttccccgcgcagccccctcccttctccactcagccgcaaggggactgc

SEQ ID NO: 5266 - DNA, 600 bp, Homo sapiens
cgcccgcctgcctgtctctaggctgcgggaggattagacacatgcgcacgattggtctctttgtgtgcaccaggaagggtctggcgtcgatttacacttcctaacggggcagagacctggaacggccgcgagtgcttgggaataaaaatgtactgtaaacaaggccaatgaaataagtgtctcgctcccgctggccttccgcgttggaagtgtccccactgccctttccccgctgcacagcttgcgagtggagatttagagcccgggaatgaggcgccgtgtccttaggaatctcgcgcccggggagcgctgagggaccggggagccgggtggggagcgggcctcggggcgcccggcggcggaggcgctcccacccgcgcggagagggatggagcgcgtcttgcgagcgtctccgagcccagccaccccacgggccagggggagggagcggggccggcgcatcagcccgccccccccggcccgccccctccccccgcgccggggagccgcggtggtgcgctccggccagctgtgcgccgccgagcgaggcgccagcccgtgggtgctgccgggggcggcggcgcggtgggggctcccgca

SEQ ID NO: 5267 - DNA, 600 bp, Homo sapiens
aggatgcgggctccccgagcgggcttcccctctgcccggcgcgatggagcgggtcggtgagcggaacaaaggcgcctgcccgggggagcgggtcttccgctgaagagcgcgggtggcgcgccgcgacggccgcctgcgggccaaggtgggaggctgtgcggccccaggcgcggcgcgctccgccgtgggcgggcggcgatccctgagtccggcacctgtgcgccgctccctctgtgcctcccgggcagccccgcctgccggcctcggagtccgcggcgccggcggctagaggtccagaggcgaaccacttgctggtgcagaagagaaaccctcaaatccctggcctttcgcggagacgcctggacggggccgtgcgccgtggactgagcaggcgtctcggggagcacttctgcagagcgaggacttccatgtgagcgattccgttctccccaccaccaatccgacctcccagccgtctccgccgcccgagcatccttgaggtgggacgagcaggggcttggatccctgccggccgtctggtgtgtgaggcttgcacggcccctggctgccccgcgcctcgccggagcccgagggggcgca

SEQ ID NO: 5268 - DNA, 600 bp, Homo sapiens
attaaccactttgccaaaggcctggccggggggggggagaggggacaaggtcgtcaggcctggcagtccaggtgggcaccctgggtggtggcaggaccctagagcccccagatcccggctactcaggatcaacagcagcaggttccagggaggaagggtactcacctggctccactgggctctgcagaggaaaagctcgcagggaggacagggagagacctctgcgtggatgagctccccggcaggggacagcagccggacgcctgggtcacgggcagtggcgtgcgcttgctcctctcccggctgccaaggaggctgcttccatgccccgcagccagctcctgtctggctgtgcagcgcgtcgctgctgcccctggtgagacgatgttcccagctgagcagcgcaagaagagaggcaagagcgaaatcaaagcagcgtggaggagagagaggcagagaagggagaaagaacgagagagccagaccgaatctgcctccaccaatgggatcagcggctgcgcagcgtcaggtgataataagcaggcttggtccctgctcgccgggctggtgggagggggaaagggcagagggtctcccagg

SEQ ID NO: 5269 - DNA, 600 bp, Homo sapiens
agactgagcggcgagaaagtgcgagccgggccggcagaatctgcctggcgggcgctggagcctgcgttactcgcggcccgcagccgtccggctactttgcgtttggcccggccagcgcccgggcgcgccgcgccattgcctgcaggctaggacttcgcgaggtgggtcgactccccctccctcctcctcttcttcctcctcttcctcctcctcttgttcctcctcctcctcccgattttccctcctcggctggcgagggtggggggggcgggggaggccggggctcgccccgagcagccacgatgctcctggacgccggcccccagtacccagcgatcggcgtgaccacctttggcgcgtcccgccaccactccgcgggcgacgtggccgaacgagacgtgggcctgggcatcaacccgttcgccgacggcatgggcgccttcaagctcaaccccagttcgcacgagctggcttcggccggccagacggccttcacgtcgcaggcgccaggctacgcggctgctgcggccctgggccatcaccatcacccgggccacgtcggctcctattccagcgcagccttcaactccacgcgggact

SEQ ID NO: 5270 - DNA, 600 bp, Homo sapiens
gcatttcaggaagtcattggtatccattgataacaaccacgttctccattttcccagaagagccaggagccactttcagtcctagttaacgaaaacgcatgcataaatcaaccactcgggtcggtcggtcttctccactccttcagcagaggacgtcggcgcccggctgcctcgcccgcctgcctgtctctaggctgcgggaggattagacacatgcgcacgattggtctctttgtgtgcaccaggaagggtctggcgtcgatttacacttcctaacggggcagagacctggaacggccgcgagtgcttgggaataaaaatgtactgtaaacaaggccaatgaaataagtgtctcgctcccgctggccttccgcgttggaagtgtccccactgccctttccccgctgcacagcttgcgagtggagatttagagcccgggaatgaggcgccgtgtccttaggaatctcgcgcccggggagcgctgagggaccggggagccgggtggggagcgggcctcggggcgcccggcggcggaggcgctcccacccgcgcggagagggatggagcgcgtcttgcgagcgtctccgagcccagccaccc

SEQ ID NO: 5271 - DNA, 600 bp, Homo sapiens
cagaggacgtcggcgcccggctgcctcgcccgcctgcctgtctctaggctgcgggaggattagacacatgcgcacgattggtctctttgtgtgcaccaggaagggtctggcgtcgatttacacttcctaacggggcagagacctggaacggccgcgagtgcttgggaataaaaatgtactgtaaacaaggccaatgaaataagtgtctcgctcccgctggccttccgcgttggaagtgtccccactgccctttccccgctgcacagcttgcgagtggagatttagagcccgggaatgaggcgccgtgtccttaggaatctcgcgcccggggagcgctgagggaccggggagccgggtggggagcgggcctcggggcgcccggcggcggaggcgctcccacccgcgcggagagggatggagcgcgtcttgcgagcgtctccgagcccagccaccccacgggccagggggagggagcggggccggcgcatcagcccgccccccccggcccgccccctccccccgcgccggggagccgcggtggtgcgctccggccagctgtgcgccgccgagcgaggcgccagcccgtgggtgctgccgggg

SEQ ID NO: 5272 - DNA, 600 bp, Homo sapiens
aagacgaaccgagtgccgctgcgggaagacactgaagcaagagcgacacccctttccgccccccaccttgcagcgcaggctttgaaagctgctcccccacctgaatggaaactcggaaccgccgggcggcgcgttccttctcgcccagccttgcaatccatgccgagaggaaggcagtgcgagcccgcgccagcgcccagctcccgggacagggtcggcaatgctgctgagcagaacttgatcgcgctccttcctcgctgctagtggaagcgatgctgcacggcacagctagcgcttccccggctctccttcaagctgaaggttaccgacccgcgcagccagccccagcactgtgagctgcgcgcctcaggtccgggctccggctgcttggcggcggcgcccagggcaacaaccgggccgcccgcgccggggcgcactgcaccagcggcttcggcttggtggatgtgtatgcatgagttctgcaccgaatgggcgcaaaaagcgccccagccggtccacccgctcctcgatcttccagatcagcaagcccccgctgcagagcggagattgggagcgcaggggcagcggctccgagagcgc

SEQ ID NO: 5273 - DNA, 600 bp, Homo sapiens
ggaggggaaagacgaaccgagtgccgctgcgggaagacactgaagcaagagcgacacccctttccgccccccaccttgcagcgcaggctttgaaagctgctcccccacctgaatggaaactcggaaccgccgggcggcgcgttccttctcgcccagccttgcaatccatgccgagaggaaggcagtgcgagcccgcgccagcgcccagctcccgggacagggtcggcaatgctgctgagcagaacttgatcgcgctccttcctcgctgctagtggaagcgatgctgcacggcacagctagcgcttccccggctctccttcaagctgaaggttaccgacccgcgcagccagccccagcactgtgagctgcgcgcctcaggtccgggctccggctgcttggcggcggcgcccagggcaacaaccgggccgcccgcgccggggcgcactgcaccagcggcttcggcttggtggatgtgtatgcatgagttctgcaccgaatgggcgcaaaaagcgccccagccggtccacccgctcctcgatcttccagatcagcaagcccccgctgcagagcggagattgggagcgcaggggcagcggctcc

SEQ ID NO: 5274 - DNA, 600 bp, Homo sapiens
gggtggccgggcagcaccagggacagcgcccgggactccactggggaccggctcctgggcttcccagcgtcgcgggtagaggtacagctgctccgtgtgccgcaggctccagattctcgccaccccacccctccctcagaaactcggactgctctcgtctgccgtgtggttctcttttcttccgaaaggccagtgtcttatctctccacttcaagtccagaggacttgctcagtctcctccccttaagtcatttccaccatcctcaggcagctgtgggaagccgagagtcctggactgttcgtccgggtgccagcgctggcagtcccagtccgtccggtgcagcagcccggcgcattcccctctctccctccctcttgctctccctccctttctgtcttcctctctttcctcctctactgctccctccctctcttgcctcttaagtttcctgcaccgtgaatccaactgtgccaagccttggctcccgcgaaccaatcctgagcgcgacccgggcactgggacggcgactccgccaaagctggacgaggcagccggacccgtctgcgctcgagcatggagacggagcgcctgggagggca

SEQ ID NO: 5275 - DNA, 600 bp, Homo sapiens
gacgaccggacagagagaggcactgaccgatcgccagcagcctcccggtgggaccgcgtctcctgcacaccccgcgcagcgccccccgccggagccgcaccgggcaagccggcgagggagcggggctgattggcggccgccggcggccaggggagggggcgccgcgcggggccatggcaggctcggaggcgtcctagcccgagccggagccgatccgagcccacgcggccgccgcctctccgctcccgggcccccgccgccaccgcgccccccgcgggagatggaacagcggaaccggctcggtgccctcggatacctgccgcctctgctgctgcatgccctgctgctcttcgtggccgacggtgagcgcgggaactttgctgccgctgtggactcgggggggtctttgctggggccgccaccgagaagaagaagaaagagaacgaaccgggaagcttcgcggtctccagcaatcccgctgtgcagcctgggcccggaggggtagggagaggcgagcggcgaagggtcgccgcagcagcagcgccgcgcccgagtcgttcccagtcccgccggggccccggctgcggaaaggatgcctgc

SEQ ID NO: 5276 - DNA, 600 bp, Homo sapiens
gccagtgtcttatctctccacttcaagtccagaggacttgctcagtctcctccccttaagtcatttccaccatcctcaggcagctgtgggaagccgagagtcctggactgttcgtccgggtgccagcgctggcagtcccagtccgtccggtgcagcagcccggcgcattcccctctctccctccctcttgctctccctccctttctgtcttcctctctttcctcctctactgctccctccctctcttgcctcttaagtttcctgcaccgtgaatccaactgtgccaagccttggctcccgcgaaccaatcctgagcgcgacccgggcactgggacggcgactccgccaaagctggacgaggcagccggacccgtctgcgctcgagcatggagacggagcgcctgggagggcacgtccggggcgctggagacgccaggcccgagtagcttctccatggagcctgcccagagcggtcccttctcgcaggattcgccccaagtcctgtgcggtacgtaccctttgcctccgctgttcccggagggtacacctgggagcggggtggtgggcacgaggaagggacggcagggaggggcgctggtt

SEQ ID NO: 5277 - DNA, 600 bp, Homo sapiens
aggccagtgtcttatctctccacttcaagtccagaggacttgctcagtctcctccccttaagtcatttccaccatcctcaggcagctgtgggaagccgagagtcctggactgttcgtccgggtgccagcgctggcagtcccagtccgtccggtgcagcagcccggcgcattcccctctctccctccctcttgctctccctccctttctgtcttcctctctttcctcctctactgctccctccctctcttgcctcttaagtttcctgcaccgtgaatccaactgtgccaagccttggctcccgcgaaccaatcctgagcgcgacccgggcactgggacggcgactccgccaaagctggacgaggcagccggacccgtctgcgctcgagcatggagacggagcgcctgggagggcacgtccggggcgctggagacgccaggcccgagtagcttctccatggagcctgcccagagcggtcccttctcgcaggattcgccccaagtcctgtgcggtacgtaccctttgcctccgctgttcccggagggtacacctgggagcggggtggtgggcacgaggaagggacggcagggaggggcgctgg

SEQ ID NO: 5278 - DNA, 600 bp, Homo sapiens
gcgcaggagctgcagccgccgccttcgctggagcagccgaggggccggtgccacctttgctcgccccctcactaccatgtacagtgtgcgctgcaagaagaaggcgggagatgcatgcacacccccgcgacccgctccctctggctcgtcccccggcgtgcgccactgaccaggggggaatgtggtgaagacggcgaggaggagagccgaggggggaggggagggccggccggcgcgaacccaggccggagggtgcgaggagccagaggaggctggagggggcggcggccacagctgggtcggagaaagttgccccctatgcagatggcaactgtgagtacccctgtgggggggagggtgcagcgaaggctgccagggaccccgcgatcgcgccttaacacgtattggagcgagtgtgcgagtgatcatgagtgtgagcgggtgcgagcgctcggcggggctgaccgtcacgttggcggggccggcggggccaggcagtcttctccgcgtccccctcctcccgctccgtgcctcccctcccagcagctccccctccccgccccgcccggctccggctcccggcccctaccgcgaggcgcc

SEQ ID NO: 5279 - DNA, 600 bp, Homo sapiens
atgtcacggtcatgttgcatcacttcacttgttgagctgtgcgaaggcagcacttgaccacagaaacttggtgaaccgccttgctcttaaattagcccccaagaattctctccagccctatagaaatgtcttacctgcatgtgtccctggtacattctgcttcggtttcttcagggctccctgaggccaccggatgcttttcccccgtgcttacttgcccaccaaaagaggggaaaaggtgggtgcacagcgggttctcagagggtgctcctgagccccctggagctccgggtactcggccggccggcggccactcggcagcgctgcgggctgccgggaactgttctccgctcggggtgctgaaagcggacgcgggagagcgcgcagagaaggcgaggagccgggtcggccaggctctcctgcaggcgcgggtcctgctcgcggggcgtctctagaactcactccttcttcgccgaactctttctcgcttcctgccaggttgcctcatgtctctctctctctgagctgcgaaccccctcctcccagccctgacgtgagcgcctacaccagccgccgccgcagctgccgagcggggcgcgc

SEQ ID NO: 5280 - DNA, 600 bp, Homo sapiens
cgtctgccgtgtggttctcttttcttccgaaaggccagtgtcttatctctccacttcaagtccagaggacttgctcagtctcctccccttaagtcatttccaccatcctcaggcagctgtgggaagccgagagtcctggactgttcgtccgggtgccagcgctggcagtcccagtccgtccggtgcagcagcccggcgcattcccctctctccctccctcttgctctccctccctttctgtcttcctctctttcctcctctactgctccctccctctcttgcctcttaagtttcctgcaccgtgaatccaactgtgccaagccttggctcccgcgaaccaatcctgagcgcgacccgggcactgggacggcgactccgccaaagctggacgaggcagccggacccgtctgcgctcgagcatggagacggagcgcctgggagggcacgtccggggcgctggagacgccaggcccgagtagcttctccatggagcctgcccagagcggtcccttctcgcaggattcgccccaagtcctgtgcggtacgtaccctttgcctccgctgttcccggagggtacacctgggagcggggtggtgggc

SEQ ID NO: 5281 - DNA, 598 bp, Homo sapiens
caccggacagaaatgtcacggtcatgttgcatcacttcacttgttgagctgtgcgaaggcagcacttgaccacagaaacttggtgaaccgccttgctcttaaattagcccccaagaattctctccagccctatagaaatgtcttacctgcatgtgtccctggtacattctgcttcggtttcttcagggctccctgaggccaccggatgcttttcccccgtgcttacttgcccaccaaaagaggggaaaaggtgggtgcacagcgggttctcagagggtgctcctgagccccctggagctccgggtactcggccggccggcggccactcggcagcgctgcgggctgccgggaactgttctccgctcggggtgctgaaagcggacgcgggagagcgcgcagagaaggcgaggagccgggtcggccaggctctcctgcaggcgcgggtcctgctcgcggggcgtctctagaactcactccttcttcgccgaactctttctcgcttcctgccaggttgcctcatgtctctctctctctgagctgcgaaccccctcctcccagccctgacgtgagcgcctacaccagccgccgccgcagctgc

SEQ ID NO: 5282 - DNA, 598 bp, Homo sapiens
gaaagggaaagagaaagcccgggccgccagagcgcttaatcacacgtacatcctaccgggcccctctccagctggctcaggctccacactggtcctccagctcccttttctcagcgatggactcacagccccacccggagcgctggagcgcggacgcggtcactgcgcgtgcgcctcaccgcgctggcaccccggcctggcagcctttggggacctgaaccagctgcgcctgcgcaggtggaacgggtggaacgggtgggggagcggacagtcgaacggcctgagagggctcagctggtccgggtgggattctgaaggccagcggaggtgggcttactagggaaaggggcgcagcagtaactacccgcaactgagcggcgggatctgcggccgcccggggccctcggccaacatcccagcatcctctgcgccgcgccggccccggactccatttcccagcggcccctgcggcctgccctagggctgcggcgcctttgtgagcgcggccgccggccaggatcgagccctggcccgggccctggcccagccccggcctccaaggaccgcgccgaaggaggtgcccactggagggaggagg

SEQ ID NO: 5283 - DNA, 600 bp, Homo sapiens
gcttaccgcgcgcacgcctggctggagaggtgacgccgctgtctgccaacctttcccagcttttcccacgattggagccaagagaggtccccggggatctcagttgggcaattgtaagggaaggagctcaggacactgacttcaagatgaagggggaggtcagcgaagacagttctagggtgggcggcggccgctgacagagcaggagccacagccaccggggcttggagataggagcaagtcgcaggcggagggggctgcgggctggctgcctgggcagcacaggacttgagggagctgcggggactcctggagtctcatcaggccttccagtcgctgtggggaccccggctgcgcgcggatcgcctgcgccactgtccccactgacccgcccgccgggtttgccaattaccagcgccacctggtcccgcacccaaccccacattttctctgtcaagggcttgtttccagggctccaggaactttcaaaatgttattggtgtgtgtcgggggggtggggggcgggggggttgtgtgggggcgggagtgtaaaggaggagggaactcttcttttctctttgtctttgtaaatggacacct

SEQ ID NO: 5284 - DNA, 600 bp, Homo sapiens
gaggcctgacttgcaagcagctttcttcgcctcgttctcggggcttcagggaggcggcgactggagccccgctgcctactcacaacaaaagaaagcagggctggcgcccctacacgcgctcccattcactgccggccgcggggagaatcctaccccgcgccctcgccagggtcccggggagctctgggctggcggaggcgaacaagatgcggtttgacagaaccaggccgtgcttctgcaaacctcaatgccgctccgccagccgcggcggcctcccagactccatttgccggggagctccgagccgcgcaaaatctctgcaagctgtgctctgcagaatgcaaagccgggctggaatccgccattcccgccgccccagccgactcggccgacgagctccctcctgagcctcccgggccatctgccgggacggttacctcgttcggtgaagccggtgcattcaccacatcctctgctgctcctagcagggaagccggcggtgaggcgggggagcaggcatggtggctccggggtttatgcggggtttactgcttacccagaatagcggctactgctgcctactagggcgcacctaccgct

SEQ ID NO: 5285 - DNA, 600 bp, Homo sapiens
tcttcatgcctcagaaacgtggcctactctgcattcggtgtgtgcggaagcagcaatcacagaggcagccctaataccggaggcggcggcggcagcagcagggccaggtggtagctcggggctgaggatcgcggcgggggcagccgctatggggcccaagccctgacacacgtaccattcgctcaagtcggcggtacgcgccgccaccgccgccgaggaggccacctgggacttgtggccgcagtccgacgagggcgacacgagggcagacggtgtagccgaatcgtagccagagctgggcggcggcgagcgcccgtgcaccttcatgtgcttacgcagcgagctggggtgcgtgtagcacttgtcgcagccccgcaccttgcacgtgtatggcttgtcgctagtgtgcacgtgcgaatgcttcttacggtcgctgctgttggcgaagcgccgctcgcagccctcgaactcgcatctgaagggcttctcgcctggcggaggcaacgcagagacattagtgcttgtgggtcgtgttcccgtcaggtgcttgccaccctcccccattcgtctctcattttctggaaaagaactacaaaatat

SEQ ID NO: 5286 - DNA, 600 bp, Homo sapiens
ccccagacccagagctgccccgcggatgaggagggggcgtggctgagggacacggtgtttgttccccatccctgagttccgtgcggacctgccccagccccagcacagtcaccctgtggaactggcatccaggagaggtgctccgctctgtgcgctccttcctcccggctgtgtgctccctgtccacagctccccatccacagcttcggcactgtggggctggtgctccaggagggaaggcccggttctttgcatcccctttccgcaaccgctagggtctctgtgcgggccctagaggaacgctcactcatcgcgcagctcaccagggaccccagcttggcagaaaccaggggctctctgcgggttctctcaaatgagtcctttgcggtgggggagcgcggatggggaggtgggtgcgtccctcgcgacgggaactacctcaccagcggtcctgtccggggctccttcacctcagtgtcctcttctctacaatgggagtgacggccctgctttgggttggaggaatttaaaggagttaacgtatggcgcccgcagggctcacgaaaggtagccgtgtggtttttccgaccttttttatta

SEQ ID NO: 5287 - DNA, 600 bp, Homo sapiens
ataccggaggcggcggcggcagcagcagggccaggtggtagctcggggctgaggatcgcggcgggggcagccgctatggggcccaagccctgacacacgtaccattcgctcaagtcggcggtacgcgccgccaccgccgccgaggaggccacctgggacttgtggccgcagtccgacgagggcgacacgagggcagacggtgtagccgaatcgtagccagagctgggcggcggcgagcgcccgtgcaccttcatgtgcttacgcagcgagctggggtgcgtgtagcacttgtcgcagccccgcaccttgcacgtgtatggcttgtcgctagtgtgcacgtgcgaatgcttcttacggtcgctgctgttggcgaagcgccgctcgcagccctcgaactcgcatctgaagggcttctcgcctggcggaggcaacgcagagacattagtgcttgtgggtcgtgttcccgtcaggtgcttgccaccctcccccattcgtctctcattttctggaaaagaactacaaaatattttcagaaatccctttccacggcgcctcaggtcgagcacccctttccctcgtgcagagagcgcccccggtgcc

SEQ ID NO: 5288 - DNA, 600 bp, Homo sapiens
ggcggggagaggagtccctccccaacttcactcccctaatcaagccgcgggtgagataggcagccggcggtttgtgcccatctgtgggggcaagtcctaccttctgccaaaaggcgcgacgcatgcacaaaagatggatccaggctatctttctctgccatcagctcaggcaaatatttctcctcttccatagcgcggacttcggattgtccccgggcgaagcgcgaggttccgctcgctcggacgcaggcagggtcttggggcagcgcctggctcccgcgctgctcctcctccgcgcggcgagggatctctgtgcgtcctcactggcccatgcacccagcacctgcgactcccgccgtcgggctgcgtggccccgcgcccacacctgcccgtcccttccgtcgtccctcgctcgcgcagagccccggctcacaccagcggccttaactggagaggcgggaacaggacgcggcccacctccgccaaccactcattggtggtggtgccaggagaggcggggcgctggcagaaggccgcgggctctcattgggcggtagcgcaagtcgggtggcctgactggcaggaggcagctgcagaggg

SEQ ID NO: 5289 - DNA, 600 bp, Homo sapiens
cccccttcctgtattagcatgcgggcggcggcgagccggccgggtggggagggcggcggtggcatcgctgcgcggggcgcattgtgggccgcgctcgcctccgcgggggaccatctgctcgctgtcaatgcatcacctgctcgtctgggccgtcgccggggcaacggggggcgggggattaaggagcgtgtgcgtctcggtccgggccgaggcggcgaggtgggggttggggcgggggaggagagctccttggccccccacccccctgccccgagacgggtcgacccgctcgggggccggcgaccaccgcgacgggttccgccgcttgcctccgctccttggcctttgctgccgtgctgcctcttctcacgggcgcggctggagtcccggggagcagcagagagcaaacggtccggctctacctcaccctgccagggggcgagtcccgcgctccctgcgtctacctggagctgcagggtccctatcccggggcgccgcccgcagcctcctccgcgggagctggagcactctgctgggtcctggggacgcggcgcagcgtggttccaagcgctccgcagtcgccgggcaaccacaatgggg

SEQ ID NO: 5290 - DNA, 600 bp, Homo sapiens
cgagcgcgagcgcaaccgcgtcaagttggtcaacctgggctttgccacccttcgggagcacgtccccaacggcgcggccaacaagaagatgagtaaggtggagacactgcgctcggcggtcgagtacatccgcgcgctgcagcagctgctggacgagcatgacgcggtgagcgccgccttccaggcaggcgtcctgtcgcccaccatctcccccaactactccaacgacttgaactccatggccggctcgccggtctcatcctactcgtcggacgagggctcttacgacccgctcagccccgaggagcaggagcttctcgacttcaccaactggttctgaggggctcggcctggtcaggccctggtgcgaatggactttggaagcaggtaggttgcattttggggtgggcaggggggtattcttgccttcgtcctccctctgagtgtctgtggaagtggggatgtctccaaggagataaggggatttttatttaaagaatttgtgaaagttggtcgatttcaagtcctagtttgttagtttcagcactggcctctgaaaatggccttgcccaggtctccaaggagtgaagggtagtagtg

SEQ ID NO: 5291 - DNA, 601 bp, Homo sapiens
ccggagagacctcggagcagagaaggcgccgccgaccctcgcggctgcctggcccgcggctcctacaaaggcgggctagccgcccgccctctcccttgccttcctccccttcttttctgactttccctctttcccttaatcgcctgcttcttcctccgggtggacttacggccaccttgctcctccgcgcttcacctcatcgccccctctttctttcttctgcctctctctctgcgcccccttctctccgtgtcacgctccctcctggttctgcgcgtctacaaacttttgagcagaacacgagcctcggcaaacgagtcccgcagctcctcctgctgctcccgctggttcctgcggcttctgctcagacaccaacgccagacggcgatgcctctcgggtggtgactccagcgcaggaacttgaagaagcgctttgcccgccgtcctacctggcagctctcctggcagcgggaggagttgaagggtaagggagggaaaatcttaccaaagcgaccggctcactcgactgctgattctttcgcttggcatcgcgtcaggggagttagctttccttcagccgggtctggctagttattgggcg

SEQ ID NO: 5292 - DNA, 600 bp, Homo sapiens
ttgctcttaaattagcccccaagaattctctccagccctatagaaatgtcttacctgcatgtgtccctggtacattctgcttcggtttcttcagggctccctgaggccaccggatgcttttcccccgtgcttacttgcccaccaaaagaggggaaaaggtgggtgcacagcgggttctcagagggtgctcctgagccccctggagctccgggtactcggccggccggcggccactcggcagcgctgcgggctgccgggaactgttctccgctcggggtgctgaaagcggacgcgggagagcgcgcagagaaggcgaggagccgggtcggccaggctctcctgcaggcgcgggtcctgctcgcggggcgtctctagaactcactccttcttcgccgaactctttctcgcttcctgccaggttgcctcatgtctctctctctctgagctgcgaaccccctcctcccagccctgacgtgagcgcctacaccagccgccgccgcagctgccgagcggggcgcgcgccgttctcccagccgcgtgcctgccgagaggccgcgggaccgggcacgcgcgcgcgttcccaggggcctgggagcggcc

SEQ ID NO: 5293 - DNA, 600 bp, Homo sapiens
ctggccttggtagacgcgggcttcactactagcgtggtgccgccgctgctggccaacctgcgcggaccagcgctctggctgccgcgcagccactgcacggcccagctgtgcgcatcgctggctctgggttccgccgaatgcgtcctcctggcggtgatggctctggaccgcgcggccgcagtgtgccgcccgctgcgctatgcggggctcgtctccccgcgcctatgtcgcacgctggccagcgcctcctggctaagcggcctcaccaactcggttgcgcaaaccgcgctcctggctgagcggccgctgtgcgcgccccgcctgctggaccacttcatctgtgagctgccggcgttgctcaagctggcctgcggaggcgacggagacactaccgagaaccagatgttcgccgcccgcgtggtcatcctgctgctgccgtttgccgtcatcctggcctcctacggtgccgtggcccgagctgtctgttgcatgcggttcagcggaggccggaggagggcggtgggcacgtgtgggtcccacctgacagccgtctgcctgttctacggctcggccatctacacctacctgcagcccgcgcag

SEQ ID NO: 5294 - DNA, 600 bp, Homo sapiens
aggggcgaggctcgagggtccctaggggtggtgggacgcaaggcccatgcccgtctatggcctctcgccgccggcagctcgcagccacccgagcatcgcctcggcgcgggccgcgacgctctccgccccgagggcacgctcccggggctcttggccgcccctcgcccaccgggctctgggtagcccctcaccaggctcttggcggccacctagcccggcgcccggccccctgcggccggcccatttagtgtgaatcctggatccggcagcggcggcggcttcttcaggggtagctgatgccggggccttggagagggacgctttgggagggtcctgggaggcggcgcggcgagcaaagggggcaagaagggcgtgctgtgctcccgcctggctcccggggcgtcgtttgggggcggccggggagttttctacttggaagcccctctgaagccaccgcgtctcctttgcccggcctcgtctccgctgcccacgcaggctgccgcgctctggcctcggccccggctctcggagctgcccggcgggctccgggtctcgccctccagcccccaggcggcccgcggcggatccccgagaggcagc

SEQ ID NO: 5295 - DNA, 600 bp, Homo sapiens
tgctctttccccctccggaagccctcgcgtcctcatccttaccccacctcttgttccccaagcgtggccagggctaaggctccagggatgcgccaagcacccttcggttttcccggggagaattttccccggcccggggactagggtctggcgctggggcgcccctcggacctgcgggatcgcccctacactctggcgcgctgagggcggtgagcgagggcgccaaggcacaggtggggcgggagtcgagcgcggaggctcggggggcgggacgcggggcctgggagcggccagggaccgcggcagcgcctcagtgccagcctggcgcccgcgactgcctgccccagcccctcagtggcggcttgctctcttctctcgctccgaaccagacacagccgctgccgctgccgtccggcgcgctacagactcccgagaacagccctggctgtcagcgagcaccagccgcttcctgtccccatcgcggagactggaggggcgcaccacggccatggagccagaggcgcttcaggaggcaagagaagtccccgcgcgctccgcagcccggcgcagctcatggtgagcgccctctggggctcgagg

SEQ ID NO: 5296 - DNA, 600 bp, Homo sapiens
tcttcgttttcttagatttcaaacttgcaaggatcgcaaggatccagggccccaggaaaggaggggtgtgaaggactcaaaattccagcagcttggctggggtggctgcgccagacgggcccttccccaaagtgcaaacccacccctgtcctcggccccggcgcgctccctccctcagcccggggccgtacaccacctgccctctaccgagagatctgggcggcggcggccgaaagcagcgacgcgcccggagcatcccttgcgatacgctaggggacggtgctttctctgtcccagttgcgtgcggcggggctggggcccaggccgccccaaatctcccccactagagtgaccaccgcacagttgtccccgctgggcgcgctcctccggtgtctgcgctcagccgctctcctcttctctctcccgcccgcccgcagcgccatggtctggcagtgtgtttagcgctcaccaccatgtgcaccagcttgttgctagtgtacagcagcctcggcggccagaaggagcggcccccgcagcagcagcagcagcagcagcaacagcagcagcaggcgtcggccaccggcagctcgcagccggcgg

SEQ ID NO: 5297 - DNA, 600 bp, Homo sapiens
gcccctttccctaacgctgcccactgaggcgtcctcaccgtctaccctgttggggtcgctctctgacccccgcgctgcatccccgggaccgacccacctgctgcgcagctaccccaggccggtcccagccgcccggagccccagtgcgcgatggcggccggcaaactgcgcctgcgcactgggcctcaccgcggactacgactcccacaatgccgcgaggctgtgccgcgcaccggggcgagcaagggagccgtgacaggtgacagtgcgcatggccaatcagacgcgagtgtggcctcccggcgtcccgcccactccggcgcctgcgtcattttgggcaccatggcaacgaagtaaacaagcgggtaaataatagacccctgacagccagagacccggagaaacaaagacggtgagaaacggagaaacaaagacaaaaagacgcgcagaccgggagggagagaagcatgaaggcccacagacgctcgggggcagaccaagacgccctggggtccccgaaacagagatgtacagagtcggacacggaaagggagagaccagctcacggttaagaaaggagggagaccagcccaggatcaa

SEQ ID NO: 5298 - DNA, 600 bp, Homo sapiens
gtgaaccgccttgctcttaaattagcccccaagaattctctccagccctatagaaatgtcttacctgcatgtgtccctggtacattctgcttcggtttcttcagggctccctgaggccaccggatgcttttcccccgtgcttacttgcccaccaaaagaggggaaaaggtgggtgcacagcgggttctcagagggtgctcctgagccccctggagctccgggtactcggccggccggcggccactcggcagcgctgcgggctgccgggaactgttctccgctcggggtgctgaaagcggacgcgggagagcgcgcagagaaggcgaggagccgggtcggccaggctctcctgcaggcgcgggtcctgctcgcggggcgtctctagaactcactccttcttcgccgaactctttctcgcttcctgccaggttgcctcatgtctctctctctctgagctgcgaaccccctcctcccagccctgacgtgagcgcctacaccagccgccgccgcagctgccgagcggggcgcgcgccgttctcccagccgcgtgcctgccgagaggccgcgggaccgggcacgcgcgcgcgttcccaggggcct

SEQ ID NO: 5299 - DNA, 598 bp, Homo sapiens
gagcgcacgggcgcggcggggagggtactcactgtgaagcacgctgcgcccatggatcatgtctgtgcgttacaccagaggctccgggctccactaattccatttagagacgggaagacttccagtggcggggggaggacagggtcgagaggtgttaaagacgcaaagcaagaaggaaataaaggggggccgagagggagaccgagaggaagggggagctccgagcccacgctgcagccagatccggatgagtccgtcctccgccccgggcgggctctcgctctcgctggccctcagcgccgcgcagccagcagcatccccaccgtgacgctcgcatcacacccgggcgccggccgccaccatccgcgccgccgccgtcaggaccctcctcccgggcatcgtcgccgccgcggggtcgggaggacgcggcgcgcgggaggcggcggtcgcagggcgagccccgggacgccccgagccggggccggggccggggagagggcgcagcgaggtgggggccagtccagaccgacggcagcgacggagcgggcggcggcggcggcgccggcggcggcggggtggctcagtccccagtctcaga

SEQ ID NO: 5300 - DNA, 598 bp, Homo sapiens
gctcttaaattagcccccaagaattctctccagccctatagaaatgtcttacctgcatgtgtccctggtacattctgcttcggtttcttcagggctccctgaggccaccggatgcttttcccccgtgcttacttgcccaccaaaagaggggaaaaggtgggtgcacagcgggttctcagagggtgctcctgagccccctggagctccgggtactcggccggccggcggccactcggcagcgctgcgggctgccgggaactgttctccgctcggggtgctgaaagcggacgcgggagagcgcgcagagaaggcgaggagccgggtcggccaggctctcctgcaggcgcgggtcctgctcgcggggcgtctctagaactcactccttcttcgccgaactctttctcgcttcctgccaggttgcctcatgtctctctctctctgagctgcgaaccccctcctcccagccctgacgtgagcgcctacaccagccgccgccgcagctgccgagcggggcgcgcgccgttctcccagccgcgtgcctgccgagaggccgcgggaccgggcacgcgcgcgcgttcccaggggcctgggagcggcc

SEQ ID NO: 5301 - DNA, 600 bp, Homo sapiens
aggcgtcctcaccgtctaccctgttggggtcgctctctgacccccgcgctgcatccccgggaccgacccacctgctgcgcagctaccccaggccggtcccagccgcccggagccccagtgcgcgatggcggccggcaaactgcgcctgcgcactgggcctcaccgcggactacgactcccacaatgccgcgaggctgtgccgcgcaccggggcgagcaagggagccgtgacaggtgacagtgcgcatggccaatcagacgcgagtgtggcctcccggcgtcccgcccactccggcgcctgcgtcattttgggcaccatggcaacgaagtaaacaagcgggtaaataatagacccctgacagccagagacccggagaaacaaagacggtgagaaacggagaaacaaagacaaaaagacgcgcagaccgggagggagagaagcatgaaggcccacagacgctcgggggcagaccaagacgccctggggtccccgaaacagagatgtacagagtcggacacggaaagggagagaccagctcacggttaagaaaggagggagaccagcccaggatcaagaaagggaaagaccagcatgggctca

SEQ ID NO: 5302 - DNA, 600 bp, Homo sapiens
tggggccctccgctgcgcactcggccctgcgccgagcaccctgcagcctcctcccgcgacacggcgctttgaactcggcggattgattttgcttcccttcccccttttgtgtgtgtttgcgttcaattggttaggtttttaagatttgggagggctggtgtgaaagaattaaaatactcttaactggagcccctccgccgagaactggaggtcccgcctcctagttcggcgctttcaggaccctcttcccagagggaatttctttcagaaattccagggtgggcttgtaaaagacgcttccgcagagcaggtcccgtcagggtctttttcctgttcctggtgccagcggtcggcccgggcgccccgcagacctcggcgaggtagatgttaagctcggagagtgcccctcccgcaggcgccgtggcgagatcactctgaatatgtaacatatttgtaacgtgcgccgaggtgtgatgtgtgtgctgaaatagggggatgggggaattcgaagccggattgggaaggcgggggggaggcgcacagaactcacaatgtacttcgcaatctaacaatctgaacattcatttattaaaagctgct

SEQ ID NO: 5303 - DNA, 600 bp, Homo sapiens
ccactgaggcgtcctcaccgtctaccctgttggggtcgctctctgacccccgcgctgcatccccgggaccgacccacctgctgcgcagctaccccaggccggtcccagccgcccggagccccagtgcgcgatggcggccggcaaactgcgcctgcgcactgggcctcaccgcggactacgactcccacaatgccgcgaggctgtgccgcgcaccggggcgagcaagggagccgtgacaggtgacagtgcgcatggccaatcagacgcgagtgtggcctcccggcgtcccgcccactccggcgcctgcgtcattttgggcaccatggcaacgaagtaaacaagcgggtaaataatagacccctgacagccagagacccggagaaacaaagacggtgagaaacggagaaacaaagacaaaaagacgcgcagaccgggagggagagaagcatgaaggcccacagacgctcgggggcagaccaagacgccctggggtccccgaaacagagatgtacagagtcggacacggaaagggagagaccagctcacggttaagaaaggagggagaccagcccaggatcaagaaagggaaagaccagcatg

SEQ ID NO: 5304 - DNA, 600 bp, Homo sapiens
aggcagatgggcagcagcagcctgaagatgagcccgcacaccacttctgaggccatcgcgtcggtccggcgagtcggagcagaggggcgaggctcgagggtccctaggggtggtgggacgcaaggcccatgcccgtctatggcctctcgccgccggcagctcgcagccacccgagcatcgcctcggcgcgggccgcgacgctctccgccccgagggcacgctcccggggctcttggccgcccctcgcccaccgggctctgggtagcccctcaccaggctcttggcggccacctagcccggcgcccggccccctgcggccggcccatttagtgtgaatcctggatccggcagcggcggcggcttcttcaggggtagctgatgccggggccttggagagggacgctttgggagggtcctgggaggcggcgcggcgagcaaagggggcaagaagggcgtgctgtgctcccgcctggctcccggggcgtcgtttgggggcggccggggagttttctacttggaagcccctctgaagccaccgcgtctcctttgcccggcctcgtctccgctgcccacgcaggctgccgcgctctggcctcggcc

SEQ ID NO: 5305 - DNA, 600 bp, Homo sapiens
ccacacagggtgcgggcggggcgggcggggctggggtgtcgggggctcggattcggagccagctctgccgtggggcgggctggggcaggcttcccgctctgggaaatttgcccctgctctccctgccagttgcggtcgtgggcggcctcgccttggagccctggccacggagccgcacggggcggtagagaggctggtggggagggaccagcgggcggtggaggggcggccctgcaggcgacgcggggactggaaagggcgcctgggtgggaagaggcgctggcgggtgatcgtccccaccgggccagtccccgggatctgctgccgcccctctccgaaattcacagccagagcgggcgcactggtgtgtgtggcgcctggagcgctagggtccccacccaagtgcgaggcccccgcggggagcccagcccaggggcgtccacagtccaggccccagaccccaggtcctggctagattcgccaaagtcagaggctggaatctggagggcggatgtgagggtgccagctaagcccagcccctgcccggcggtggccagcataacgcggtgacactctctggagcccccactgccaccactc

SEQ ID NO: 5306 - DNA, 600 bp, Homo sapiens
cagctcaatgtgagcgagctgacgccgtccagccatgccagtgcgctccggcagcagtacgcgcagcagtccgcgcagcagtcggcgtccgcctcccagtaccaccagtgccacagcctgcagcccgccgccagccccacgggcagcctcggcagtctgggctccgggcccccgctctcgcaccaccaccaccacccgcacccggcgcaccaccagcaccaccagccccaggcgcgccgcgagagcaaccccttcaccgaaatagccatgagcagctgcaggtacaacgggggcgtcatgcggccgctcagcaacttgagcgcgtcccgccggaacctgcacgagatggactcagaggcgcagcccctgcagccccccgcgtctgtcggaggaggtggcggcgcgtcctccccgtctgcagccgctgccgccgccgccgctgtttcgtcctcagcccccgagatcgtggtgtctaagcccgagcacaacaactccaacaacctggcgctctatggaaccggcggcggaggcagcactggaggaggcggcggcggtggcgggagcgggcacggcagcagcagtggcaccaagtccagcaaa

SEQ ID NO: 5307 - DNA, 600 bp, Homo sapiens
ggcttcactactagcgtggtgccgccgctgctggccaacctgcgcggaccagcgctctggctgccgcgcagccactgcacggcccagctgtgcgcatcgctggctctgggttccgccgaatgcgtcctcctggcggtgatggctctggaccgcgcggccgcagtgtgccgcccgctgcgctatgcggggctcgtctccccgcgcctatgtcgcacgctggccagcgcctcctggctaagcggcctcaccaactcggttgcgcaaaccgcgctcctggctgagcggccgctgtgcgcgccccgcctgctggaccacttcatctgtgagctgccggcgttgctcaagctggcctgcggaggcgacggagacactaccgagaaccagatgttcgccgcccgcgtggtcatcctgctgctgccgtttgccgtcatcctggcctcctacggtgccgtggcccgagctgtctgttgcatgcggttcagcggaggccggaggagggcggtgggcacgtgtgggtcccacctgacagccgtctgcctgttctacggctcggccatctacacctacctgcagcccgcgcagcgctacaaccaggcacgg

SEQ ID NO: 5308 - DNA, 600 bp, Homo sapiens
aggagggggaggggaggccaggccgggccgggccgggccgggtgcggggggtccggggatcttcctgaggccctggcggggcgagtttccagcagcgcgcgtctgtgtggagtccgttttgctgcccggggcctggggaaggccgtttcggggctggcgggggcaggctttgcggggcatccctagtctgagaggagggcggggcccaacgcccagctggacaggagctgctccgacggcccctgagggaacgcgcgccccgcccctggccccacctctgccccacaccgggcactgggccgccacctttgttgatggaagagagaaactgaggcatagtgcccagggccaggggaccgcaaccacccggcccttgtcactgtagcgttaaggctcagagtctgcgcagcagatatgtgtccgcacccgccaggccttcagcttccctcagacaggcgggaaaaccctaggctgcccttctccgagcggagggccgccccacacacagcaggcgcttaaacgggtacgcggggccctggacggctctccgcggagctccccaggctctggcgcagttccccggcttggggacctgagcac

SEQ ID NO: 5309 - DNA, 600 bp, Homo sapiens
atgcagttcatttagttaacaagtgaaataatgaggaagcgtgcagagtgaatgccaagagaaaaggcacaaaaaccctattgagaggccccggccgctcctggcgtagtccatcacatggcaatagtcctatttaagccgcgccgccggcgcctttcagcaccactagcgctggccagcaccccgcgctctttgggcggtgcccacggcagcagaggctactgtttcagcctaggtctcagccgcgcgttcagcctcctgggcagaggcagctgcgggataccgcggccagggaaagcgcgtggagagccgaaaggtgcggtgggcgcagagggcgggctggctgcggggcgaccgcgcgccggggccatgccgcgctccttcctggtggactcgctagtgctgcgcgaggcgggcgagaagaaggcgcccgagggcagcccgccgccgctcttcccctacgctgtgcccccgccgcacgcgctgcacggtctctcgcctggcgcctgccacgcgcgcaaggctgggctgctgtgcgtgtgcccgctctgcgtcaccgcctcgcagctgcatgggccccccgggccgcccgcgctgcct

SEQ ID NO: 5310 - DNA, 600 bp, Homo sapiens
gatcttcctgaggccctggcggggcgagtttccagcagcgcgcgtctgtgtggagtccgttttgctgcccggggcctggggaaggccgtttcggggctggcgggggcaggctttgcggggcatccctagtctgagaggagggcggggcccaacgcccagctggacaggagctgctccgacggcccctgagggaacgcgcgccccgcccctggccccacctctgccccacaccgggcactgggccgccacctttgttgatggaagagagaaactgaggcatagtgcccagggccaggggaccgcaaccacccggcccttgtcactgtagcgttaaggctcagagtctgcgcagcagatatgtgtccgcacccgccaggccttcagcttccctcagacaggcgggaaaaccctaggctgcccttctccgagcggagggccgccccacacacagcaggcgcttaaacgggtacgcggggccctggacggctctccgcggagctccccaggctctggcgcagttccccggcttggggacctgagcaccgcctctgcctgccccagctgctcacctcccctttcccacagagcagggccagccgt

SEQ ID NO: 5311 - DNA, 600 bp, Homo sapiens
ttggggtcgctctctgacccccgcgctgcatccccgggaccgacccacctgctgcgcagctaccccaggccggtcccagccgcccggagccccagtgcgcgatggcggccggcaaactgcgcctgcgcactgggcctcaccgcggactacgactcccacaatgccgcgaggctgtgccgcgcaccggggcgagcaagggagccgtgacaggtgacagtgcgcatggccaatcagacgcgagtgtggcctcccggcgtcccgcccactccggcgcctgcgtcattttgggcaccatggcaacgaagtaaacaagcgggtaaataatagacccctgacagccagagacccggagaaacaaagacggtgagaaacggagaaacaaagacaaaaagacgcgcagaccgggagggagagaagcatgaaggcccacagacgctcgggggcagaccaagacgccctggggtccccgaaacagagatgtacagagtcggacacggaaagggagagaccagctcacggttaagaaaggagggagaccagcccaggatcaagaaagggaaagaccagcatgggctcaagaaaagaaagagaccagctcag

SEQ ID NO: 5312 - DNA, 600 bp, Homo sapiens
ctgacccccgcgctgcatccccgggaccgacccacctgctgcgcagctaccccaggccggtcccagccgcccggagccccagtgcgcgatggcggccggcaaactgcgcctgcgcactgggcctcaccgcggactacgactcccacaatgccgcgaggctgtgccgcgcaccggggcgagcaagggagccgtgacaggtgacagtgcgcatggccaatcagacgcgagtgtggcctcccggcgtcccgcccactccggcgcctgcgtcattttgggcaccatggcaacgaagtaaacaagcgggtaaataatagacccctgacagccagagacccggagaaacaaagacggtgagaaacggagaaacaaagacaaaaagacgcgcagaccgggagggagagaagcatgaaggcccacagacgctcgggggcagaccaagacgccctggggtccccgaaacagagatgtacagagtcggacacggaaagggagagaccagctcacggttaagaaaggagggagaccagcccaggatcaagaaagggaaagaccagcatgggctcaagaaaagaaagagaccagctcaggctcaggaaaaga

SEQ ID NO: 5313 - DNA, 600 bp, Homo sapiens
gagtctgaagcgcccgcgaggaagcgagcgccagcgcgggccgccggcgatgacggccgcgaagcaggagccgcagcccaccccgggggccagggcgagccaggcgcagccggcggaccaggtgagagtcggcagccgcggccaggccctcccgggaggggtggctccagtgcgcgctccgcccgcctcccgcttcccaggctgggctcccgcgcctccctcttctcaccctcccccgccccgccccagttccaggctctcctgcttctccacggactctgcgggaagttagagcctctgcgtgcgctccggggcccggcgagaggatgcgcaaggtggagagccgcggggaagggggcagagaggtaaaggctgaaggtgccccggggaaccccggcgggcggcccaccgagggagggagaggcggccgggaccaaggaatggggcctcttggttccccattaacgcacgctgaagaaatctgctgcgctcctgacggccgctcaccgggttcgagccccgtcctcctatagccggggcgctcgctggccaaagcgacccgagcaggcgaatgacctttaggcggacggggttttccct

SEQ ID NO: 5314 - DNA, 600 bp, Homo sapiens
gactggaaccgcggcccgaggtaactggagggcacggcgggggcggggcgctcatcccaggcggcttctgattggcctcggccgcctcgtgcgtcacagccccgcccctgcccgggagtcccgcagcggtgacttgtcaccgacgcccggcgtgatccagcggaccaatggcggccgcccgcggcgcgcagggtgcggggatggggtccgcccgcggcgttgggcgcgctcgccagcccaggggtcgccatgaccgagtggcccaggcccgagcgaagcccgcgcgcggtgagtccgccgcggcccatccgtccctccgcccgccagagcgtccatcgggacgcccacccgggagggtctcggcgccgcgtcggcgggagctggcccgggatcgcggtccaggggcgcgcgtcgggggaggcgggcccgggcccgggagggggcgggccgggccggggttccagagcccatcgggagtcctgaggtcgccgtaggggagggaaggggaaggctagaggccacgcggggcggggactgggggggctggggccgccccttccgcagggaccccgacccctgttggcatccgcctgtccgttt

SEQ ID NO: 5315 - DNA, 600 bp, Homo sapiens
acgcgggcttcactactagcgtggtgccgccgctgctggccaacctgcgcggaccagcgctctggctgccgcgcagccactgcacggcccagctgtgcgcatcgctggctctgggttccgccgaatgcgtcctcctggcggtgatggctctggaccgcgcggccgcagtgtgccgcccgctgcgctatgcggggctcgtctccccgcgcctatgtcgcacgctggccagcgcctcctggctaagcggcctcaccaactcggttgcgcaaaccgcgctcctggctgagcggccgctgtgcgcgccccgcctgctggaccacttcatctgtgagctgccggcgttgctcaagctggcctgcggaggcgacggagacactaccgagaaccagatgttcgccgcccgcgtggtcatcctgctgctgccgtttgccgtcatcctggcctcctacggtgccgtggcccgagctgtctgttgcatgcggttcagcggaggccggaggagggcggtgggcacgtgtgggtcccacctgacagccgtctgcctgttctacggctcggccatctacacctacctgcagcccgcgcagcgctacaaccagg

SEQ ID NO: 5316 - DNA, 600 bp, Homo sapiens
cggcgatgacggccgcgaagcaggagccgcagcccaccccgggggccagggcgagccaggcgcagccggcggaccaggtgagagtcggcagccgcggccaggccctcccgggaggggtggctccagtgcgcgctccgcccgcctcccgcttcccaggctgggctcccgcgcctccctcttctcaccctcccccgccccgccccagttccaggctctcctgcttctccacggactctgcgggaagttagagcctctgcgtgcgctccggggcccggcgagaggatgcgcaaggtggagagccgcggggaagggggcagagaggtaaaggctgaaggtgccccggggaaccccggcgggcggcccaccgagggagggagaggcggccgggaccaaggaatggggcctcttggttccccattaacgcacgctgaagaaatctgctgcgctcctgacggccgctcaccgggttcgagccccgtcctcctatagccggggcgctcgctggccaaagcgacccgagcaggcgaatgacctttaggcggacggggttttccctctgctttcttgtttcttttgaggagacgggtgtgtgtttgtgag

SEQ ID NO: 5317 - DNA, 600 bp, Homo sapiens
agacgcgggcttcactactagcgtggtgccgccgctgctggccaacctgcgcggaccagcgctctggctgccgcgcagccactgcacggcccagctgtgcgcatcgctggctctgggttccgccgaatgcgtcctcctggcggtgatggctctggaccgcgcggccgcagtgtgccgcccgctgcgctatgcggggctcgtctccccgcgcctatgtcgcacgctggccagcgcctcctggctaagcggcctcaccaactcggttgcgcaaaccgcgctcctggctgagcggccgctgtgcgcgccccgcctgctggaccacttcatctgtgagctgccggcgttgctcaagctggcctgcggaggcgacggagacactaccgagaaccagatgttcgccgcccgcgtggtcatcctgctgctgccgtttgccgtcatcctggcctcctacggtgccgtggcccgagctgtctgttgcatgcggttcagcggaggccggaggagggcggtgggcacgtgtgggtcccacctgacagccgtctgcctgttctacggctcggccatctacacctacctgcagcccgcgcagcgctacaacca

SEQ ID NO: 5318 - DNA, 600 bp, Homo sapiens
tgtgctgcgctggccgcctggaccagggtggctgctggagagtgttttccctctgggtttccttctccttggctcccagggaatcctctggcggtgcctccgggaggctggtagccggggaagcaggcacgtgaatccaccgggctgccccaccccaacctgaggtcagagctgaggcgtaggggccggggtaggggcagaggtgccgaaacgcactagctggggactcccgggggaaggagataggagagacccaaggcgagccttaggactcgcccctatgactatgactacgcgctgcgtccgaaccacatgtccaccccgcatttgccttcggggaccagaccgcgctccctcagatggctggggagggagcagactccgggtgaaggctgggggaggtaccgggatgccgagtacgccagagcaggcgggggatgggttccggcttcctgccgcctcggcatctcgctttgcaccgggcaaagaaggggccacgaccggcgaagagcgcgtggagacacagggacccgcgatccaggggcaggaaccccgccccctcccggaaacctcccgggccctgagtcgtgcccggcgctc

SEQ ID NO: 5319 - DNA, 600 bp, Homo sapiens
ccgcgcgcgtcggggctgctcccgggaggaaggcggcgcggaggccgggggcggccgctgagcttggcgtccgcgcggctccggtgcgggctgcgccgcgccttccccagcgagctaccgagcttggggccgccgcggtccgctcccgccgcccggcctctccctcctcggccaccgccgcagcccctgccccgccgagccccgccggacagcggcggccgcagcgcgcatttgggctccgaggaagttgaccgaggcggctgccgcaggatcccgggcccggatcgcacgaagcccgcgcggccgtctcctccgcgcgccacccctgcgcctcccgcgagctccacttcccatctgctattgtttccgattgttttccggtggcgagcccggctccgaaacttacaaagtgttggatgtcccccgttcgaactgagggactgcagaccgcctctgggtagctggatgaagcccaccccgtccccttctggtaccaaagtgcttactcctctccaaagtgccgtgtctgaactgccgctgggaagaagcggctcctgagacgcgcccacacctttcacctgccgcgcgcttccccctcct

SEQ ID NO: 5320 - DNA, 598 bp, Homo sapiens
ccgcccggcctctccctcctcggccaccgccgcagcccctgccccgccgagccccgccggacagcggcggccgcagcgcgcatttgggctccgaggaagttgaccgaggcggctgccgcaggatcccgggcccggatcgcacgaagcccgcgcggccgtctcctccgcgcgccacccctgcgcctcccgcgagctccacttcccatctgctattgtttccgattgttttccggtggcgagcccggctccgaaacttacaaagtgttggatgtcccccgttcgaactgagggactgcagaccgcctctgggtagctggatgaagcccaccccgtccccttctggtaccaaagtgcttactcctctccaaagtgccgtgtctgaactgccgctgggaagaagcggctcctgagacgcgcccacacctttcacctgccgcgcgcttccccctcctcggccaccttcccggcggaagcagcgaggagggagccccctttggccgtcctccgtggaaccggttttccgaggctggcaaaagccgaggctggatttgggggaggaatattagactcggaggagtctgcgcgcttttctcctccc

SEQ ID NO: 5321 - DNA, 600 bp, Homo sapiens
gccgcccggcagggagaggcggagtcactggcgcccggggcggggtgttggggaggggtgagtagggacaggagggagggggtggagagttgggctgctgcgacgcctcccggtggctctggcggcaccaatgcggggcaccggagcaggtgtccgactgcggtgcgggctaccactccgccggggaacctcgtcttgctcctccctgcgcttcgcctctggaatctctcccttatctcatgccgcggtgaaactttgctcaagttggtggtgctctgaggtctccagggctggaggccgcgcgacgcgaatcgccgacactggattctcgggcgttagtccgaagtttaagttcccttcgttcactcctttgccctggatcgaaccgcagccccaggacgcagcgggttccactggaaacggggaatcggggagaggcggtcgctgggctccgggcgacctgggaacgagggcgtttgctccccctcccgaccgagcgggcggccggcgtcagcaccgcggacagcgcatcggtgccgcagccgcgggcgggcgccgctagggctgccaggggtccgaggcgcgggcaaggctgctcac

SEQ ID NO: 5322 - DNA, 600 bp, Homo sapiens
gtggagagttgggctgctgcgacgcctcccggtggctctggcggcaccaatgcggggcaccggagcaggtgtccgactgcggtgcgggctaccactccgccggggaacctcgtcttgctcctccctgcgcttcgcctctggaatctctcccttatctcatgccgcggtgaaactttgctcaagttggtggtgctctgaggtctccagggctggaggccgcgcgacgcgaatcgccgacactggattctcgggcgttagtccgaagtttaagttcccttcgttcactcctttgccctggatcgaaccgcagccccaggacgcagcgggttccactggaaacggggaatcggggagaggcggtcgctgggctccgggcgacctgggaacgagggcgtttgctccccctcccgaccgagcgggcggccggcgtcagcaccgcggacagcgcatcggtgccgcagccgcgggcgggcgccgctagggctgccaggggtccgaggcgcgggcaaggctgctcaccccgctgtgctgtgcaccccaaaccttccctgttttcctttctacctcccgtgtgcacccccctacccgccacccgaggca

SEQ ID NO: 5323 - DNA, 600 bp, Homo sapiens
tgcgggctgcgccgcgccttccccagcgagctaccgagcttggggccgccgcggtccgctcccgccgcccggcctctccctcctcggccaccgccgcagcccctgccccgccgagccccgccggacagcggcggccgcagcgcgcatttgggctccgaggaagttgaccgaggcggctgccgcaggatcccgggcccggatcgcacgaagcccgcgcggccgtctcctccgcgcgccacccctgcgcctcccgcgagctccacttcccatctgctattgtttccgattgttttccggtggcgagcccggctccgaaacttacaaagtgttggatgtcccccgttcgaactgagggactgcagaccgcctctgggtagctggatgaagcccaccccgtccccttctggtaccaaagtgcttactcctctccaaagtgccgtgtctgaactgccgctgggaagaagcggctcctgagacgcgcccacacctttcacctgccgcgcgcttccccctcctcggccaccttcccggcggaagcagcgaggagggagccccctttggccgtcctccgtggaaccggttttccgaggctggcaaaag

SEQ ID NO: 5324 - DNA, 600 bp, Homo sapiens
gcccgagctgggcgccgtcctagagccaagcgcccgctagagccgagactagggggcggtgaggagtgggacccgctcgcggccattggttgtgcggccaggaggggcggagggacgacgcgcgggctgtgcggggccggcagcccggatccactcccgctgcgcctgctgtccgccgtgcgcccagactgcgcgccgcgccgctgcgcccaacattcccgaggacggcttcgcgggcgcgtatcgtccagaccggagcaccgccccaccgctagcgcaggagacctgccggggaagtcgcgtgtcctgacctgcaggtcagtgagggaaacttgcagggtcccgagctctgggggtgaacttgccctacgcggagagcgccccactccttgcctggggcggcctcgggtcctggaggcgagccgcctcccagactctcccccgagatctgggctcccggagatgtggctcctttctgagaaacacccccaaatctatcccttttgaggtgtccttactgtcccgagaagcaatcgcagcccggctctccgagtcttggggtgactccacgggctgcaggaggagccgcgaggggccctg

SEQ ID NO: 5325 - DNA, 600 bp, Homo sapiens
gagggcagggccgcaagacttctggggtccgaataggtcaggggtcggcagccccagcgggtgcgtagccagagcttggactcggggaagagggcgagaatcgtgacctcaagaagctgggggtggggtggggtggccagggggaagggaggggaggcggtgggggcgcccttgtgggtaggtgggatgcgaaggggaggaggggtctagaaccgcctgcgcctcgcggtttcctgcaggtgagccccgagggagcgggggacgaggactcgtgctcctcctcggccccgctgtccccgtcgtcctcgccccggtccatggcctcgggctccggctgccctcctggcaagtgtgtgtgcaacagttgcggcctggagatcgtggacaaataccttctcaaggtaggatagggcctcgggtgcgaggcccaaggggagcgggcttagcgtgggagctctgggaaaagagtaatgttcctcccaccaacctttccgttcaagttctgggtgaaggttgtaggcttttgcagaaaatcagcccagtttagggcaactcatgcggtgggataaagtgagaagaaatcccagactcttctatgtc

SEQ ID NO: 5326 - DNA, 600 bp, Homo sapiens
caagcagctggtaggagaatctgggctggattcggaaggcgcagctacaggacgcccgctgccccggatcggaaggcgcagcacctcaggccacaatctcagacacgccctcgggtcccgacaggtgttgcccgcctcccacggggctccgggaccccggtccccgggctgccccctgccttctggggcgctggagcgcgcgcagtggcggagctggagccacccagtgcttcgcacgggcgcgctccgcttctccgggttttagcggaagcctgcggggggcggggtaaccgcggaagccggcggccgtgggcgcgcgggttgggggctctcgcgccgctccgggctctccccccccccggctgcggttgccgaagagaggccggagcgcggcgcccggctgctccacctggcgcgctgagcaccgcgcggggagcccccgggggcgggcggtggggggcgcggactgcgggaagaaggcacgaggcgtcgccgcagctcggtcaggggccggggccccgccgctcgccgctgcactaacttgccgcttggtctcgcctcgccgccgcggctcgctgcgctttgggtggcggggggcgg

SEQ ID NO: 5327 - DNA, 600 bp, Homo sapiens
gcagctggtaggagaatctgggctggattcggaaggcgcagctacaggacgcccgctgccccggatcggaaggcgcagcacctcaggccacaatctcagacacgccctcgggtcccgacaggtgttgcccgcctcccacggggctccgggaccccggtccccgggctgccccctgccttctggggcgctggagcgcgcgcagtggcggagctggagccacccagtgcttcgcacgggcgcgctccgcttctccgggttttagcggaagcctgcggggggcggggtaaccgcggaagccggcggccgtgggcgcgcgggttgggggctctcgcgccgctccgggctctccccccccccggctgcggttgccgaagagaggccggagcgcggcgcccggctgctccacctggcgcgctgagcaccgcgcggggagcccccgggggcgggcggtggggggcgcggactgcgggaagaaggcacgaggcgtcgccgcagctcggtcaggggccggggccccgccgctcgccgctgcactaacttgccgcttggtctcgcctcgccgccgcggctcgctgcgctttgggtggcggggggcgggga

SEQ ID NO: 5328 - DNA, 600 bp, Homo sapiens
tccctgcagccggtcctcttcgcccttgtcctcctgtgctacctcctgaccttgacgggcaactcggcgctggtgctgctggcggtgcgcgacccgcgcctgcacacgcccatgtactacttcctctgccacctggccttggtagacgcgggcttcactactagcgtggtgccgccgctgctggccaacctgcgcggaccagcgctctggctgccgcgcagccactgcacggcccagctgtgcgcatcgctggctctgggttccgccgaatgcgtcctcctggcggtgatggctctggaccgcgcggccgcagtgtgccgcccgctgcgctatgcggggctcgtctccccgcgcctatgtcgcacgctggccagcgcctcctggctaagcggcctcaccaactcggttgcgcaaaccgcgctcctggctgagcggccgctgtgcgcgccccgcctgctggaccacttcatctgtgagctgccggcgttgctcaagctggcctgcggaggcgacggagacactaccgagaaccagatgttcgccgcccgcgtggtcatcctgctgctgccgtttgccgtcatcctggcctcctacggtgcc

SEQ ID NO: 5329 - DNA, 600 bp, Homo sapiens
agaaggagcactgctgtccgccccaagaacggggtctgtccgcccgagctctaaggcgagcatcttcagggggacagtttctgcgaaggcggggagaggagtccctccccaacttcactcccctaatcaagccgcgggtgagataggcagccggcggtttgtgcccatctgtgggggcaagtcctaccttctgccaaaaggcgcgacgcatgcacaaaagatggatccaggctatctttctctgccatcagctcaggcaaatatttctcctcttccatagcgcggacttcggattgtccccgggcgaagcgcgaggttccgctcgctcggacgcaggcagggtcttggggcagcgcctggctcccgcgctgctcctcctccgcgcggcgagggatctctgtgcgtcctcactggcccatgcacccagcacctgcgactcccgccgtcgggctgcgtggccccgcgcccacacctgcccgtcccttccgtcgtccctcgctcgcgcagagccccggctcacaccagcggccttaactggagaggcgggaacaggacgcggcccacctccgccaaccactcattggtggtggtgccaggaga

SEQ ID NO: 5330 - DNA, 600 bp, Homo sapiens
cgcaagacttctggggtccgaataggtcaggggtcggcagccccagcgggtgcgtagccagagcttggactcggggaagagggcgagaatcgtgacctcaagaagctgggggtggggtggggtggccagggggaagggaggggaggcggtgggggcgcccttgtgggtaggtgggatgcgaaggggaggaggggtctagaaccgcctgcgcctcgcggtttcctgcaggtgagccccgagggagcgggggacgaggactcgtgctcctcctcggccccgctgtccccgtcgtcctcgccccggtccatggcctcgggctccggctgccctcctggcaagtgtgtgtgcaacagttgcggcctggagatcgtggacaaataccttctcaaggtaggatagggcctcgggtgcgaggcccaaggggagcgggcttagcgtgggagctctgggaaaagagtaatgttcctcccaccaacctttccgttcaagttctgggtgaaggttgtaggcttttgcagaaaatcagcccagtttagggcaactcatgcggtgggataaagtgagaagaaatcccagactcttctatgtcgttgcaaaaca

SEQ ID NO: 5331 - DNA, 600 bp, Homo sapiens
gcggtcacacacctgcaggaacacgcgcacactacacaccgttgctctcgcctcccggtatcaccttcgaacgcgctggccggccccctcctagcctggtgcagtcggctccgcttctactcagtctcgggtcctcctgggccaacgcagaccctggtgcctccttccttagacgagctaaggtcaagacttctgctgctgcggaggagcccgcgcaccaggccggggtggactgcgcctgcgcatcgggcccgcctggttcttaggaactacgactcccagggggcgctgcgcgctcgccggcaccgcgactaaagcttgcaaagcctgggtcatcgaaactacaactcccagaaggctaagcgtctgcacacgctaggtccgcagggcgctgacccctgggggcccgaggagcgccgggctgctgccccgagccccgcccactacagcctcagtgcatggcggtgggcgcttccagtaactcaggggtgggacttttttcttgctcaggggatgaggccgagcccacaggcttagaaagaaggaacttgagtccgggcacctgtcatcccagcgcttagggaggccgaggcgggtgga

SEQ ID NO: 5332 - DNA, 600 bp, Homo sapiens
ctggtaggagaatctgggctggattcggaaggcgcagctacaggacgcccgctgccccggatcggaaggcgcagcacctcaggccacaatctcagacacgccctcgggtcccgacaggtgttgcccgcctcccacggggctccgggaccccggtccccgggctgccccctgccttctggggcgctggagcgcgcgcagtggcggagctggagccacccagtgcttcgcacgggcgcgctccgcttctccgggttttagcggaagcctgcggggggcggggtaaccgcggaagccggcggccgtgggcgcgcgggttgggggctctcgcgccgctccgggctctccccccccccggctgcggttgccgaagagaggccggagcgcggcgcccggctgctccacctggcgcgctgagcaccgcgcggggagcccccgggggcgggcggtggggggcgcggactgcgggaagaaggcacgaggcgtcgccgcagctcggtcaggggccggggccccgccgctcgccgctgcactaacttgccgcttggtctcgcctcgccgccgcggctcgctgcgctttgggtggcggggggcggggagagc

SEQ ID NO: 5333 - DNA, 600 bp, Homo sapiens
acacctgcaggaacacgcgcacactacacaccgttgctctcgcctcccggtatcaccttcgaacgcgctggccggccccctcctagcctggtgcagtcggctccgcttctactcagtctcgggtcctcctgggccaacgcagaccctggtgcctccttccttagacgagctaaggtcaagacttctgctgctgcggaggagcccgcgcaccaggccggggtggactgcgcctgcgcatcgggcccgcctggttcttaggaactacgactcccagggggcgctgcgcgctcgccggcaccgcgactaaagcttgcaaagcctgggtcatcgaaactacaactcccagaaggctaagcgtctgcacacgctaggtccgcagggcgctgacccctgggggcccgaggagcgccgggctgctgccccgagccccgcccactacagcctcagtgcatggcggtgggcgcttccagtaactcaggggtgggacttttttcttgctcaggggatgaggccgagcccacaggcttagaaagaaggaacttgagtccgggcacctgtcatcccagcgcttagggaggccgaggcgggtggatcacctga

SEQ ID NO: 5334 - DNA, 600 bp, Homo sapiens
gaaggggtgtggaggagccagatgggaagagaagcagcgggacgagggcgaggaagggctggagattgttagaggacagatggggcgggactggggagaggggcgaaggcgacgcgccgaggcactcctccgccccatgagcacagacagtaactccgaaacgcgcagatgggccgtaaggtaaagaggccttttttccctctcctctccgtcctctaccctgctcccctcctagacacttggtgaaaaagcaaggtgcggtgtacctggagcgaacaccatgatttcttccagccgctacgcccccagattaagagagaaagacaggcagacggaggatgggaagaaggccggacttggcggggtccggtgcaggagggcgcgctgggcgggcggcgggcggggcggtcagcaccccggacagctcccgccgctagatcctggggccgcagctccagccgccgccgcgcgctctgcctccacaatgcggccacagcggcggcgggaggaggagggtgaatccccgctcagtccatccctcattcctgtgccagctcggcgacgtacactgctgcttagggagcaaagcacttccaccgc

SEQ ID NO: 5335 - DNA, 600 bp, Homo sapiens
gctcggaaggggtgtggaggagccagatgggaagagaagcagcgggacgagggcgaggaagggctggagattgttagaggacagatggggcgggactggggagaggggcgaaggcgacgcgccgaggcactcctccgccccatgagcacagacagtaactccgaaacgcgcagatgggccgtaaggtaaagaggccttttttccctctcctctccgtcctctaccctgctcccctcctagacacttggtgaaaaagcaaggtgcggtgtacctggagcgaacaccatgatttcttccagccgctacgcccccagattaagagagaaagacaggcagacggaggatgggaagaaggccggacttggcggggtccggtgcaggagggcgcgctgggcgggcggcgggcggggcggtcagcaccccggacagctcccgccgctagatcctggggccgcagctccagccgccgccgcgcgctctgcctccacaatgcggccacagcggcggcgggaggaggagggtgaatccccgctcagtccatccctcattcctgtgccagctcggcgacgtacactgctgcttagggagcaaagcacttcc

SEQ ID NO: 5336 - DNA, 600 bp, Homo sapiens
ccttcgaacgcgctggccggccccctcctagcctggtgcagtcggctccgcttctactcagtctcgggtcctcctgggccaacgcagaccctggtgcctccttccttagacgagctaaggtcaagacttctgctgctgcggaggagcccgcgcaccaggccggggtggactgcgcctgcgcatcgggcccgcctggttcttaggaactacgactcccagggggcgctgcgcgctcgccggcaccgcgactaaagcttgcaaagcctgggtcatcgaaactacaactcccagaaggctaagcgtctgcacacgctaggtccgcagggcgctgacccctgggggcccgaggagcgccgggctgctgccccgagccccgcccactacagcctcagtgcatggcggtgggcgcttccagtaactcaggggtgggacttttttcttgctcaggggatgaggccgagcccacaggcttagaaagaaggaacttgagtccgggcacctgtcatcccagcgcttagggaggccgaggcgggtggatcacctgaggtcaggagttcgagaccagcctggccaatatggcgaaacccccgtctctactaa

SEQ ID NO: 5337 - DNA, 600 bp, Homo sapiens
gacaagccaccttctccatgctcctctccccaaagggtaagatttattctaagggttctgaattcgtcacatttataaaccccgtgggtccggcacagcaattaacattggtccaaacggtgtcagtgaactttagctgcaaagaaactacctcatttaaaatttaagcagaccacagggagtagcattggaggaaagagaggagattttctccttcaacattttgagcatactggaatgccaaccccctaggtaggtgccagggccaccacaggaacctgactcgcaggagtcgtcctccgtctctacgcgaagcgccccctcgaggtgggcagggggtggcggcggcgacggtggcggagccgcagagcgagctagagagcgagagcggtgagactctgcggacgtcttcccgcccgccgcgctccgccccacccagcctccgcagcctcgggccggatcgcccggcggggaagatgcgcctcaagaaccaggtagaagcgcctcggcgcaggccccgcacccccgactctgcccgccctctgttacggacacccgctgggccacgtggtcgcgactggcttctcccagcggccagcc

SEQ ID NO: 5338 - DNA, 600 bp, Homo sapiens
caccgttgctctcgcctcccggtatcaccttcgaacgcgctggccggccccctcctagcctggtgcagtcggctccgcttctactcagtctcgggtcctcctgggccaacgcagaccctggtgcctccttccttagacgagctaaggtcaagacttctgctgctgcggaggagcccgcgcaccaggccggggtggactgcgcctgcgcatcgggcccgcctggttcttaggaactacgactcccagggggcgctgcgcgctcgccggcaccgcgactaaagcttgcaaagcctgggtcatcgaaactacaactcccagaaggctaagcgtctgcacacgctaggtccgcagggcgctgacccctgggggcccgaggagcgccgggctgctgccccgagccccgcccactacagcctcagtgcatggcggtgggcgcttccagtaactcaggggtgggacttttttcttgctcaggggatgaggccgagcccacaggcttagaaagaaggaacttgagtccgggcacctgtcatcccagcgcttagggaggccgaggcgggtggatcacctgaggtcaggagttcgagaccagcctggcca

SEQ ID NO: 5339 - DNA, 598 bp, Homo sapiens
tgccaaagacaagccaccttctccatgctcctctccccaaagggtaagatttattctaagggttctgaattcgtcacatttataaaccccgtgggtccggcacagcaattaacattggtccaaacggtgtcagtgaactttagctgcaaagaaactacctcatttaaaatttaagcagaccacagggagtagcattggaggaaagagaggagattttctccttcaacattttgagcatactggaatgccaaccccctaggtaggtgccagggccaccacaggaacctgactcgcaggagtcgtcctccgtctctacgcgaagcgccccctcgaggtgggcagggggtggcggcggcgacggtggcggagccgcagagcgagctagagagcgagagcggtgagactctgcggacgtcttcccgcccgccgcgctccgccccacccagcctccgcagcctcgggccggatcgcccggcggggaagatgcgcctcaagaaccaggtagaagcgcctcggcgcaggccccgcacccccgactctgcccgccctctgttacggacacccgctgggccacgtggtcgcgactggcttctcccag

SEQ ID NO: 5340 - DNA, 600 bp, Homo sapiens
tacattccctgccaaagacaagccaccttctccatgctcctctccccaaagggtaagatttattctaagggttctgaattcgtcacatttataaaccccgtgggtccggcacagcaattaacattggtccaaacggtgtcagtgaactttagctgcaaagaaactacctcatttaaaatttaagcagaccacagggagtagcattggaggaaagagaggagattttctccttcaacattttgagcatactggaatgccaaccccctaggtaggtgccagggccaccacaggaacctgactcgcaggagtcgtcctccgtctctacgcgaagcgccccctcgaggtgggcagggggtggcggcggcgacggtggcggagccgcagagcgagctagagagcgagagcggtgagactctgcggacgtcttcccgcccgccgcgctccgccccacccagcctccgcagcctcgggccggatcgcccggcggggaagatgcgcctcaagaaccaggtagaagcgcctcggcgcaggccccgcacccccgactctgcccgccctctgttacggacacccgctgggccacgtggtcgcgactggctt

SEQ ID NO: 5341 - DNA, 600 bp, Homo sapiens
cacgcggtcacacacctgcaggaacacgcgcacactacacaccgttgctctcgcctcccggtatcaccttcgaacgcgctggccggccccctcctagcctggtgcagtcggctccgcttctactcagtctcgggtcctcctgggccaacgcagaccctggtgcctccttccttagacgagctaaggtcaagacttctgctgctgcggaggagcccgcgcaccaggccggggtggactgcgcctgcgcatcgggcccgcctggttcttaggaactacgactcccagggggcgctgcgcgctcgccggcaccgcgactaaagcttgcaaagcctgggtcatcgaaactacaactcccagaaggctaagcgtctgcacacgctaggtccgcagggcgctgacccctgggggcccgaggagcgccgggctgctgccccgagccccgcccactacagcctcagtgcatggcggtgggcgcttccagtaactcaggggtgggacttttttcttgctcaggggatgaggccgagcccacaggcttagaaagaaggaacttgagtccgggcacctgtcatcccagcgcttagggaggccgaggcgggt

SEQ ID NO: 5342 - DNA, 600 bp, Homo sapiens
gttccttctcgcccagccttgcaatccatgccgagaggaaggcagtgcgagcccgcgccagcgcccagctcccgggacagggtcggcaatgctgctgagcagaacttgatcgcgctccttcctcgctgctagtggaagcgatgctgcacggcacagctagcgcttccccggctctccttcaagctgaaggttaccgacccgcgcagccagccccagcactgtgagctgcgcgcctcaggtccgggctccggctgcttggcggcggcgcccagggcaacaaccgggccgcccgcgccggggcgcactgcaccagcggcttcggcttggtggatgtgtatgcatgagttctgcaccgaatgggcgcaaaaagcgccccagccggtccacccgctcctcgatcttccagatcagcaagcccccgctgcagagcggagattgggagcgcaggggcagcggctccgagagcgcccacaaaacccaacgagccctggacgactgcaagatggtgggtgaaaactgcgcctctttttttttttttttaattgagagggggtggggggagtcatgtatgttaatcatttgcctgagtgccagccactc

SEQ ID NO: 5343 - DNA, 598 bp, Homo sapiens
gggcggaggcaaggactctagcttgaggttctttgaggcagagcagaaattagcccctaggtgtgccgtccgtggcgcgagtcacggaactccaggtaccccggggtcgtgtccgcacctttgtcctcagtccccagaagcgtcgaaatttcttagcacgacacccctgcctcgcgctacatctcttccccctagggggttggtggcctccgtgctcaaaggaggcagcgggaacgcctaacttctaagatgcccttaattgatctcctccttcttaactacagcgagggaataacaactcggggctggggactgggtatctaagactcgctctccgcagggtccgccggcagggcggccacaggacccgggactggaactggcccgggaggacaccggcgcgtgtcaggcgcagagcgtgaaacaggcaagctgcgcgcagagcagggcttggatggcggatcttgggcacaatgagccccggatcctgaaggaagataacccctgctgagaccctgtccggagccttggagcttttcagcagtttaggctcggatctccggcctgggttttcggtgcagagctgcttgaagagttg

SEQ ID NO: 5344 - DNA, 600 bp, Homo sapiens
gcagccggcggtttgtgcccatctgtgggggcaagtcctaccttctgccaaaaggcgcgacgcatgcacaaaagatggatccaggctatctttctctgccatcagctcaggcaaatatttctcctcttccatagcgcggacttcggattgtccccgggcgaagcgcgaggttccgctcgctcggacgcaggcagggtcttggggcagcgcctggctcccgcgctgctcctcctccgcgcggcgagggatctctgtgcgtcctcactggcccatgcacccagcacctgcgactcccgccgtcgggctgcgtggccccgcgcccacacctgcccgtcccttccgtcgtccctcgctcgcgcagagccccggctcacaccagcggccttaactggagaggcgggaacaggacgcggcccacctccgccaaccactcattggtggtggtgccaggagaggcggggcgctggcagaaggccgcgggctctcattgggcggtagcgcaagtcgggtggcctgactggcaggaggcagctgcagaggggaagggagctcggaagatgcaaacgctttcttcttgcgcccaagccttccctggctatt

SEQ ID NO: 5345 - DNA, 600 bp, Homo sapiens
agagggcccaccgagcactacggcgggtgcgcacgccccggggcgctcggcaggacgacagtctgcacagcccgaaggcggaaacgagcatcaactgcacaaagtcctggggtcctggagcatcccctccgcgtccttcctccctctggggctggggacagccgggatgtcccaggctgaggtggccaccagccgagcgcggctgctaggacgctggcgtggggagcgcggcgcggaactacggacagtgagccctggcgctcgctgccctgcgccttaatttgctggcggcggcgatcccggaggcccgcagccagtcagcgccgtctcacgtcaccgcttcctgattccgccgccgggggcggggccgcgggccgggcgcggagggcgcgcccagggtgcggcgcccgcgtggcctgtcgccccggctgttcggtaccccagcacaggttcagggaaaagggtgccaccactaggctgacgcagcagccatggacatccccacctggtctcacagccccgggcgggagggcggtgcgcgctgtcgggagaggacacatcaccgcggcctaacgcccgagatccgggcatggcccagtt

SEQ ID NO: 5346 - DNA, 600 bp, Homo sapiens
agcggccgcgggcagccccgggcggcggcgggggcggcggcagggggggcggcggcggcggctgtagcggacactggggctggggctggggcgagggtggcggcggcgggggcaggtggtgatggggatgcaggaggcggaactggggctgccggagcgggtactggtggtgctgctcgtgcctccagagatgcttgggggctttgagcgtggccccgccggcgctgtcgctgccctctccgctgcccgcccgggccggcgcgctgctgccctctgcctccatcctggctcgcggctccgcgacctgctgcccagcccgggttcaccgcgctggcccgagcgccttcctgatgctgctgctgctgctgccgccgccgccgcttctgcagcccagcagaggctggtgcttagcttctcacttgaaggcgccagagcctcagggctaccgagagggggccctgccagcgggaggggtcacagaacgcggcagggctccttccaccgaggctatggcagagacacgctcccgggctccccaagtcaccaagactagggtgcgcggtgcccggtttcgccagaggttggtccttcttcctccct

SEQ ID NO: 5347 - DNA, 600 bp, Homo sapiens
gccgcgacgggaccacagaaatcgaccagcggcctgtttaaggagcgacaaggcccagccctctcctgcattgtggcgacgccatttccctgcgcccccagcgcggccgcttggcttttgtttgaggtgacgctgggcggcagcatccttccctcagccctggggaccagcggggactacagaacccagaaggttttgtctccagccgcagggatgctgagccaatccgcgctgagaaaagggtcgtttccgctttgggaccaatgggtcggggagggacttccggtatcacttcagtggcggtcatttttgcagcgcttgggtgcatccagaccgtcagagctttgggagcgctttgtttggcgacagtcggaaggcgcgaggggaggggtcctcccgctgaacagtgggggttctaagggtcggcggcggcggggttgacggctttgcctaggtccctccgcccgtagctgtcgggtcccggccccgctctgcccacagactccgatggctgcggccgcgctgagggccccgactcaggtgagcgctgcctctactgggcctcaccctccatccccaaattagtgccttcttgggtca

SEQ ID NO: 5348 - DNA, 600 bp, Homo sapiens
gggaccaatcaccggctctgagaaagttcggcagtggccaccacatctggttctcgttaacttttctaaggcagcggccgctggagcagcggggctggcggggtaaaagctcctggccagggctgcctggagctgccccttccactccgcccccagggagctcccgggtcatcctctcatccgggctgccccgcggcccccaaggagccccacccccgggaccaaatggcccgcaaggtttggggcagcggcgttgcaggagatgagctcagcgcaaagggaaccccgcagcggcgagtgcggctgctggcctgcgcgctgtggccccaacaggctggcagggcgcgggcgggtggcggggttgcggtatgagctttgctccctgccctggggtcccgggcgctcctggctctggaggcctggccatcggtccgaaaagcaaagggacattgtcgtggtcccctcggccgcttcgctccacccagagacgccctgaggagaagcgagcctttgtacgaaggcagagggctgactcctaagttctgtccccctcccgaaggccggccgctagggaagacttggccaccctctggaagtacc

SEQ ID NO: 5349 - DNA, 600 bp, Homo sapiens
caagctaattggctgaggccctcggctggggaccaatcaccggctctgagaaagttcggcagtggccaccacatctggttctcgttaacttttctaaggcagcggccgctggagcagcggggctggcggggtaaaagctcctggccagggctgcctggagctgccccttccactccgcccccagggagctcccgggtcatcctctcatccgggctgccccgcggcccccaaggagccccacccccgggaccaaatggcccgcaaggtttggggcagcggcgttgcaggagatgagctcagcgcaaagggaaccccgcagcggcgagtgcggctgctggcctgcgcgctgtggccccaacaggctggcagggcgcgggcgggtggcggggttgcggtatgagctttgctccctgccctggggtcccgggcgctcctggctctggaggcctggccatcggtccgaaaagcaaagggacattgtcgtggtcccctcggccgcttcgctccacccagagacgccctgaggagaagcgagcctttgtacgaaggcagagggctgactcctaagttctgtccccctcccgaaggccggccgctagg

SEQ ID NO: 5350 - DNA, 600 bp, Homo sapiens
tgggccaacgcagaccctggtgcctccttccttagacgagctaaggtcaagacttctgctgctgcggaggagcccgcgcaccaggccggggtggactgcgcctgcgcatcgggcccgcctggttcttaggaactacgactcccagggggcgctgcgcgctcgccggcaccgcgactaaagcttgcaaagcctgggtcatcgaaactacaactcccagaaggctaagcgtctgcacacgctaggtccgcagggcgctgacccctgggggcccgaggagcgccgggctgctgccccgagccccgcccactacagcctcagtgcatggcggtgggcgcttccagtaactcaggggtgggacttttttcttgctcaggggatgaggccgagcccacaggcttagaaagaaggaacttgagtccgggcacctgtcatcccagcgcttagggaggccgaggcgggtggatcacctgaggtcaggagttcgagaccagcctggccaatatggcgaaacccccgtctctactaaaaatacaaaaattagccgagcatggtggcatgcacttccagctacttggaaggctgaggcgggagaatggcttg

SEQ ID NO: 5351 - DNA, 598 bp, Homo sapiens
tggttcccttccacgggggtcccgaggtgctttgaggagggagaaagagggcgtcccctctggggagcccactctccgggcttctactgacctggtctccgcctcaccggcctcttgcggccgctgcagaagcgcactttgctgaacaccccgaggacgtgcctctcgcacagggagcgcccgtctttgctggggctggagcggcgcttggaggccgacactcggtcgctgttggactccctcgcctgccgcttctgccggatcaaggagctggctatcgccgcagccatagctgctcagcgagggcctcaggccccagcctctactgcgccctccggcttgcgctccgccggggcgagggcaggacctgggcggccagggaaagggcagtcgcggggaggcagtgctaaaatttgaggaggctgcagtatcgaaaacccggcgctcacaaggttagtcaaagtctgggcagtggcgacaaaatgtgtgaaaatccagatgtaaacttccccaacctctggcggccggggggcggggcggggcggtcccaggccctcttgcgaagtagacgtttgcaccccaaacttgcaccccaagg

SEQ ID NO: 5352 - DNA, 600 bp, Homo sapiens
taagcaggtgcagatgcagtgacaggctcacaggcagtcacacacctgcacctgctggtaccgtcgagtgaccaggtgcagacgctgtgttactcagggacgggctcacaggcagtcacacacctatacgggctgacaccgctaagtgaacaggtgcagacacaatggcactcggggacgggctcacacgcggtcacacacctgcaggaacacgcgcacactacacaccgttgctctcgcctcccggtatcaccttcgaacgcgctggccggccccctcctagcctggtgcagtcggctccgcttctactcagtctcgggtcctcctgggccaacgcagaccctggtgcctccttccttagacgagctaaggtcaagacttctgctgctgcggaggagcccgcgcaccaggccggggtggactgcgcctgcgcatcgggcccgcctggttcttaggaactacgactcccagggggcgctgcgcgctcgccggcaccgcgactaaagcttgcaaagcctgggtcatcgaaactacaactcccagaaggctaagcgtctgcacacgctaggtccgcagggcgctgacccctgggggcccgag

SEQ ID NO: 5353 - DNA, 600 bp, Homo sapiens
gagaggagagggcccaccgagcactacggcgggtgcgcacgccccggggcgctcggcaggacgacagtctgcacagcccgaaggcggaaacgagcatcaactgcacaaagtcctggggtcctggagcatcccctccgcgtccttcctccctctggggctggggacagccgggatgtcccaggctgaggtggccaccagccgagcgcggctgctaggacgctggcgtggggagcgcggcgcggaactacggacagtgagccctggcgctcgctgccctgcgccttaatttgctggcggcggcgatcccggaggcccgcagccagtcagcgccgtctcacgtcaccgcttcctgattccgccgccgggggcggggccgcgggccgggcgcggagggcgcgcccagggtgcggcgcccgcgtggcctgtcgccccggctgttcggtaccccagcacaggttcagggaaaagggtgccaccactaggctgacgcagcagccatggacatccccacctggtctcacagccccgggcgggagggcggtgcgcgctgtcgggagaggacacatcaccgcggcctaacgcccgagatccgggcatggc

SEQ ID NO: 5354 - DNA, 600 bp, Homo sapiens
gcagcagcagtagcactggtaacgacgacagcaccggccgcccggccacccggtccccctccatgctcgctcggccgtgcgcttacccgctgcacaacgcgtcccgccccggcctccagcccactctccgcgccgcgccagcctcgaacctggatctccgcgggcgcctgggcggggcgggactccaggcccacccagcaagctaattggctgaggccctcggctggggaccaatcaccggctctgagaaagttcggcagtggccaccacatctggttctcgttaacttttctaaggcagcggccgctggagcagcggggctggcggggtaaaagctcctggccagggctgcctggagctgccccttccactccgcccccagggagctcccgggtcatcctctcatccgggctgccccgcggcccccaaggagccccacccccgggaccaaatggcccgcaaggtttggggcagcggcgttgcaggagatgagctcagcgcaaagggaaccccgcagcggcgagtgcggctgctggcctgcgcgctgtggccccaacaggctggcagggcgcgggcgggtggcggggttgcggtatgagc

SEQ ID NO: 5355 - DNA, 600 bp, Homo sapiens
aagtccgcccccctcaccggggcatggtcggagggtggctgctgcgctccggggcagttcttctcctgcttccggggggcggggaaggagcagacacagcagacacacagagaaagagaggcagggattattgcccgaaaccgccagccgccggcagcctccgccgaccctccctgctccccaggtccgcgcgcagcctgcagcctctcagccgggttccggcagtgcgtccagggcgccgaggggaagggctgggccccggggactggggcgcggtgggggcacacagactctccaggtcgcgcgcgcccttcctgctcctctgctattttcctgaactccccagaacccccagttgcctggcttccatcgcccgcaactagcgccgctgtcgagattttccgcaatacaactgcaggggtcgttatttcctcgcctacggatccctacgcttcccaactcagagaggaggaggacaggtgggggcgggagggggaggaggagaaggaggcttggccaggtgagcgtcctcgccgccgccgggcgtcccagcgtcagctccgcagcccggcacccgggggcggaggcaggaggcccggg

SEQ ID NO: 5356 - DNA, 600 bp, Homo sapiens
aggcaaatatttctcctcttccatagcgcggacttcggattgtccccgggcgaagcgcgaggttccgctcgctcggacgcaggcagggtcttggggcagcgcctggctcccgcgctgctcctcctccgcgcggcgagggatctctgtgcgtcctcactggcccatgcacccagcacctgcgactcccgccgtcgggctgcgtggccccgcgcccacacctgcccgtcccttccgtcgtccctcgctcgcgcagagccccggctcacaccagcggccttaactggagaggcgggaacaggacgcggcccacctccgccaaccactcattggtggtggtgccaggagaggcggggcgctggcagaaggccgcgggctctcattgggcggtagcgcaagtcgggtggcctgactggcaggaggcagctgcagaggggaagggagctcggaagatgcaaacgctttcttcttgcgcccaagccttccctggctattaggcatgcccagttttgtggagttctctgtgtcttcagctaaggcgcagaggagagagagcgcgggaaaagcgcaggttaaagagagaggtctgagtacaagtggaca

SEQ ID NO: 5357 - DNA, 600 bp, Homo sapiens
agcatccttccctcagccctggggaccagcggggactacagaacccagaaggttttgtctccagccgcagggatgctgagccaatccgcgctgagaaaagggtcgtttccgctttgggaccaatgggtcggggagggacttccggtatcacttcagtggcggtcatttttgcagcgcttgggtgcatccagaccgtcagagctttgggagcgctttgtttggcgacagtcggaaggcgcgaggggaggggtcctcccgctgaacagtgggggttctaagggtcggcggcggcggggttgacggctttgcctaggtccctccgcccgtagctgtcgggtcccggccccgctctgcccacagactccgatggctgcggccgcgctgagggccccgactcaggtgagcgctgcctctactgggcctcaccctccatccccaaattagtgccttcttgggtcactacggtcgagatcctcatgtccagtacagtgggggctcgtgggtggggtccctatttccagaacttgggtgatggggcacggaagagggttacaggcaaagggaccagcgtttctaaactcttggagacacagtgaagaa

SEQ ID NO: 5358 - DNA, 600 bp, Homo sapiens
ccagcacgcggtcctggccagggacggggtcgtccgaactgccgtccagattccccaagggagacaaagacccgaaacacagctcaaagtttccgagagcagtcacagcggggccagggactccagaagtgtcagctccaacgactccagagctgcacactggcctctattccccaccgcaaagccccagagccgcagagacttcgaaggcagccggagaggagagggcccaccgagcactacggcgggtgcgcacgccccggggcgctcggcaggacgacagtctgcacagcccgaaggcggaaacgagcatcaactgcacaaagtcctggggtcctggagcatcccctccgcgtccttcctccctctggggctggggacagccgggatgtcccaggctgaggtggccaccagccgagcgcggctgctaggacgctggcgtggggagcgcggcgcggaactacggacagtgagccctggcgctcgctgccctgcgccttaatttgctggcggcggcgatcccggaggcccgcagccagtcagcgccgtctcacgtcaccgcttcctgattccgccgccgggggcggggccgcgggccgg

SEQ ID NO: 5359 - DNA, 600 bp, Homo sapiens
tcctgcattgtggcgacgccatttccctgcgcccccagcgcggccgcttggcttttgtttgaggtgacgctgggcggcagcatccttccctcagccctggggaccagcggggactacagaacccagaaggttttgtctccagccgcagggatgctgagccaatccgcgctgagaaaagggtcgtttccgctttgggaccaatgggtcggggagggacttccggtatcacttcagtggcggtcatttttgcagcgcttgggtgcatccagaccgtcagagctttgggagcgctttgtttggcgacagtcggaaggcgcgaggggaggggtcctcccgctgaacagtgggggttctaagggtcggcggcggcggggttgacggctttgcctaggtccctccgcccgtagctgtcgggtcccggccccgctctgcccacagactccgatggctgcggccgcgctgagggccccgactcaggtgagcgctgcctctactgggcctcaccctccatccccaaattagtgccttcttgggtcactacggtcgagatcctcatgtccagtacagtgggggctcgtgggtggggtccctatttccaga

SEQ ID NO: 5360 - DNA, 600 bp, Homo sapiens
gccatcagctcaggcaaatatttctcctcttccatagcgcggacttcggattgtccccgggcgaagcgcgaggttccgctcgctcggacgcaggcagggtcttggggcagcgcctggctcccgcgctgctcctcctccgcgcggcgagggatctctgtgcgtcctcactggcccatgcacccagcacctgcgactcccgccgtcgggctgcgtggccccgcgcccacacctgcccgtcccttccgtcgtccctcgctcgcgcagagccccggctcacaccagcggccttaactggagaggcgggaacaggacgcggcccacctccgccaaccactcattggtggtggtgccaggagaggcggggcgctggcagaaggccgcgggctctcattgggcggtagcgcaagtcgggtggcctgactggcaggaggcagctgcagaggggaagggagctcggaagatgcaaacgctttcttcttgcgcccaagccttccctggctattaggcatgcccagttttgtggagttctctgtgtcttcagctaaggcgcagaggagagagagcgcgggaaaagcgcaggttaaagagagaggtctgagt

SEQ ID NO: 5361 - DNA, 600 bp, Homo sapiens
cagcagtagcactggtaacgacgacagcaccggccgcccggccacccggtccccctccatgctcgctcggccgtgcgcttacccgctgcacaacgcgtcccgccccggcctccagcccactctccgcgccgcgccagcctcgaacctggatctccgcgggcgcctgggcggggcgggactccaggcccacccagcaagctaattggctgaggccctcggctggggaccaatcaccggctctgagaaagttcggcagtggccaccacatctggttctcgttaacttttctaaggcagcggccgctggagcagcggggctggcggggtaaaagctcctggccagggctgcctggagctgccccttccactccgcccccagggagctcccgggtcatcctctcatccgggctgccccgcggcccccaaggagccccacccccgggaccaaatggcccgcaaggtttggggcagcggcgttgcaggagatgagctcagcgcaaagggaaccccgcagcggcgagtgcggctgctggcctgcgcgctgtggccccaacaggctggcagggcgcgggcgggtggcggggttgcggtatgagctttg

SEQ ID NO: 5362 - DNA, 600 bp, Homo sapiens
ctggtaacgacgacagcaccggccgcccggccacccggtccccctccatgctcgctcggccgtgcgcttacccgctgcacaacgcgtcccgccccggcctccagcccactctccgcgccgcgccagcctcgaacctggatctccgcgggcgcctgggcggggcgggactccaggcccacccagcaagctaattggctgaggccctcggctggggaccaatcaccggctctgagaaagttcggcagtggccaccacatctggttctcgttaacttttctaaggcagcggccgctggagcagcggggctggcggggtaaaagctcctggccagggctgcctggagctgccccttccactccgcccccagggagctcccgggtcatcctctcatccgggctgccccgcggcccccaaggagccccacccccgggaccaaatggcccgcaaggtttggggcagcggcgttgcaggagatgagctcagcgcaaagggaaccccgcagcggcgagtgcggctgctggcctgcgcgctgtggccccaacaggctggcagggcgcgggcgggtggcggggttgcggtatgagctttgctccctgccct

SEQ ID NO: 5363 - DNA, 600 bp, Homo sapiens
ttgtggcgacgccatttccctgcgcccccagcgcggccgcttggcttttgtttgaggtgacgctgggcggcagcatccttccctcagccctggggaccagcggggactacagaacccagaaggttttgtctccagccgcagggatgctgagccaatccgcgctgagaaaagggtcgtttccgctttgggaccaatgggtcggggagggacttccggtatcacttcagtggcggtcatttttgcagcgcttgggtgcatccagaccgtcagagctttgggagcgctttgtttggcgacagtcggaaggcgcgaggggaggggtcctcccgctgaacagtgggggttctaagggtcggcggcggcggggttgacggctttgcctaggtccctccgcccgtagctgtcgggtcccggccccgctctgcccacagactccgatggctgcggccgcgctgagggccccgactcaggtgagcgctgcctctactgggcctcaccctccatccccaaattagtgccttcttgggtcactacggtcgagatcctcatgtccagtacagtgggggctcgtgggtggggtccctatttccagaacttggg

SEQ ID NO: 5364 - DNA, 600 bp, Homo sapiens
tggaagtgctggaagaaggcggagatgcgagtgatctgcaggctcaggcacctggaggcgcagcgagcgcgctggacgctcccggcagacagcgactcgtccagccgccgcgcagcagccgcgccggggccggccgccaggcagccgctggaggccgccagccagaggcagagggtcaggaccgcgccgggcaccccgggcaccatggctgcgggtcgagggcgagggcgagggcgccgggcgcgggccgaggctccctgctccgcgccggggctgcactgctgaggaccaggcagacgccgcgactgagccggaaagttcaatccttcaactccggccggaccctcctcgccgacctccctcccagctcgccctcgaggggtggggtgagggggacaggaggccgcaccattggctggaaggcgtgtgagtgacaggggggccgggcgcagggcccatgggccggtctcgtcagctgcgagcccgggcgctccgggggagggcgacgccgagcggctttccacgccgcgcaggtctcgaggggcccagctcccacgcaggcgcctctcccgttcgcaccaaccgcttcctgcccctccc

SEQ ID NO: 5365 - DNA, 600 bp, Homo sapiens
ttcgggtctctcctggctgtgcaagcgatgggccagagggctggacgaggctggctcccaatccagaatcccgagctggggagttctctctaggttctggggctcctgggaccggggctttggggaagggagatcgcaggacggatatccaggaagggagggggccctgggtctcccgttacctgcgcctgccgcgctgggactccgctctgggggctgcagctcgaagctccgacaagtctccacgtccagcccgagagggggcggccgggcccggcacagcgaggcgaggaccgcgagcgcctcctggcaccgaggcccgccggccccccacactccgctcatgccctagacacccaggcttgccgagcagcagctcgaacccgcgccccggccgcactggggcggggcacgacggccccaagaagaccctccctgcagcggccccctgcggctccgctctgcttttaatcacttccccgcagggtccccgcccctcacgtggcatcccgcggcagctggcgagtctggcgcctcgcggccgccccctctacactcagggactggcctgagtccggggggtgggggtttcgaggcggg

SEQ ID NO: 5366 - DNA, 600 bp, Homo sapiens
gccgtgcgcttacccgctgcacaacgcgtcccgccccggcctccagcccactctccgcgccgcgccagcctcgaacctggatctccgcgggcgcctgggcggggcgggactccaggcccacccagcaagctaattggctgaggccctcggctggggaccaatcaccggctctgagaaagttcggcagtggccaccacatctggttctcgttaacttttctaaggcagcggccgctggagcagcggggctggcggggtaaaagctcctggccagggctgcctggagctgccccttccactccgcccccagggagctcccgggtcatcctctcatccgggctgccccgcggcccccaaggagccccacccccgggaccaaatggcccgcaaggtttggggcagcggcgttgcaggagatgagctcagcgcaaagggaaccccgcagcggcgagtgcggctgctggcctgcgcgctgtggccccaacaggctggcagggcgcgggcgggtggcggggttgcggtatgagctttgctccctgccctggggtcccgggcgctcctggctctggaggcctggccatcggtccgaaaagcaaaggga

SEQ ID NO: 5367 - DNA, 600 bp, Homo sapiens
gacgccatttccctgcgcccccagcgcggccgcttggcttttgtttgaggtgacgctgggcggcagcatccttccctcagccctggggaccagcggggactacagaacccagaaggttttgtctccagccgcagggatgctgagccaatccgcgctgagaaaagggtcgtttccgctttgggaccaatgggtcggggagggacttccggtatcacttcagtggcggtcatttttgcagcgcttgggtgcatccagaccgtcagagctttgggagcgctttgtttggcgacagtcggaaggcgcgaggggaggggtcctcccgctgaacagtgggggttctaagggtcggcggcggcggggttgacggctttgcctaggtccctccgcccgtagctgtcgggtcccggccccgctctgcccacagactccgatggctgcggccgcgctgagggccccgactcaggtgagcgctgcctctactgggcctcaccctccatccccaaattagtgccttcttgggtcactacggtcgagatcctcatgtccagtacagtgggggctcgtgggtggggtccctatttccagaacttgggtgatggg

SEQ ID NO: 5368 - DNA, 600 bp, Homo sapiens
cgactccccgtgtgggaagagctcgtctgggtgcagcgccgcggcccgcaacattagcaacggcagcagcagtagcactggtaacgacgacagcaccggccgcccggccacccggtccccctccatgctcgctcggccgtgcgcttacccgctgcacaacgcgtcccgccccggcctccagcccactctccgcgccgcgccagcctcgaacctggatctccgcgggcgcctgggcggggcgggactccaggcccacccagcaagctaattggctgaggccctcggctggggaccaatcaccggctctgagaaagttcggcagtggccaccacatctggttctcgttaacttttctaaggcagcggccgctggagcagcggggctggcggggtaaaagctcctggccagggctgcctggagctgccccttccactccgcccccagggagctcccgggtcatcctctcatccgggctgccccgcggcccccaaggagccccacccccgggaccaaatggcccgcaaggtttggggcagcggcgttgcaggagatgagctcagcgcaaagggaaccccgcagcggcgagtgcggctgctggcc

SEQ ID NO: 5369 - DNA, 600 bp, Homo sapiens
ccgcgcatcaggcgctgttgttggagccggaacaccgtgcgactctgaccgaaccggccccctcctcgcgcacacactcgccgagccgcgcgcgcccctccgccgtgacagtggccgtggcctccgctctctcggggcacccggcagccagagcgcagcgagagcgggcggtcgccagggtcccctccccagccagtcccaggcgcccggtgcactatgcggggcacgtgcgccccccagctctaatctgcgcgctgacaggagcatgatctgtgcccaggccagggctgccaaggtaagcgggcgtagcgcggggacactgtctgccgccccttcccccccgcccttctctgggcggcttccccgccgcacgcgaggccccggcagcgccctcccttctcggggccgagatccaccctcctccccaccctctcgcttctcccgcgaggttcaattgtcagcctgggtcgcgccgccgcccggtccgggccggcatccccgggtggcgaccccggcttgggtactgcaggcgcacccggccctcctgcggggtacggagagaaacaaagaagcccccaagcgggttcgcagcgcctcccc

SEQ ID NO: 5370 - DNA, 600 bp, Homo sapiens
ggtacccacagaggagcaggcagggagggaggggatgcaagcgggaggataaagcgatgaagtgtgctgcgttaccgcgcatcaggcgctgttgttggagccggaacaccgtgcgactctgaccgaaccggccccctcctcgcgcacacactcgccgagccgcgcgcgcccctccgccgtgacagtggccgtggcctccgctctctcggggcacccggcagccagagcgcagcgagagcgggcggtcgccagggtcccctccccagccagtcccaggcgcccggtgcactatgcggggcacgtgcgccccccagctctaatctgcgcgctgacaggagcatgatctgtgcccaggccagggctgccaaggtaagcgggcgtagcgcggggacactgtctgccgccccttcccccccgcccttctctgggcggcttccccgccgcacgcgaggccccggcagcgccctcccttctcggggccgagatccaccctcctccccaccctctcgcttctcccgcgaggttcaattgtcagcctgggtcgcgccgccgcccggtccgggccggcatccccgggtggcgaccccggcttgggtactg

SEQ ID NO: 5371 - DNA, 600 bp, Homo sapiens
tcggtcgctgttggactccctcgcctgccgcttctgccggatcaaggagctggctatcgccgcagccatagctgctcagcgagggcctcaggccccagcctctactgcgccctccggcttgcgctccgccggggcgagggcaggacctgggcggccagggaaagggcagtcgcggggaggcagtgctaaaatttgaggaggctgcagtatcgaaaacccggcgctcacaaggttagtcaaagtctgggcagtggcgacaaaatgtgtgaaaatccagatgtaaacttccccaacctctggcggccggggggcggggcggggcggtcccaggccctcttgcgaagtagacgtttgcaccccaaacttgcaccccaaggcgatcggcgtccaaggggcagtggggagtttagtcacactgcgttcggggtaccaagtggaaggggaagaacgatgcccaaaataacaagacgtgcctctgttggagaggcgcaagcgttgtaaggtgtccaaagtatacctacacatacatacatagaaaacccgtttacaaagcagagtctggacccaggcgggtagcgcgcccccggtagaaaatactaa

SEQ ID NO: 5372 - DNA, 600 bp, Homo sapiens
tgaacaccccgaggacgtgcctctcgcacagggagcgcccgtctttgctggggctggagcggcgcttggaggccgacactcggtcgctgttggactccctcgcctgccgcttctgccggatcaaggagctggctatcgccgcagccatagctgctcagcgagggcctcaggccccagcctctactgcgccctccggcttgcgctccgccggggcgagggcaggacctgggcggccagggaaagggcagtcgcggggaggcagtgctaaaatttgaggaggctgcagtatcgaaaacccggcgctcacaaggttagtcaaagtctgggcagtggcgacaaaatgtgtgaaaatccagatgtaaacttccccaacctctggcggccggggggcggggcggggcggtcccaggccctcttgcgaagtagacgtttgcaccccaaacttgcaccccaaggcgatcggcgtccaaggggcagtggggagtttagtcacactgcgttcggggtaccaagtggaaggggaagaacgatgcccaaaataacaagacgtgcctctgttggagaggcgcaagcgttgtaaggtgtccaaagtatacctac

SEQ ID NO: 5373 - DNA, 600 bp, Homo sapiens
ctggctcagctctgcacgccccccagctagctcccgctctagtcacctcttccccgcgcccccgcccctctagagctcgcgcccgcccccccccacccgcgcctcctctgcccgccctcctccccctcccccttccctcctgccctcccttcattccacaagtgtcgcttcgctctcttcagcgcacttggcgagctggtgaggtgagagggatactgcgagagggctaggggcggccagtccggggctgccggccaaggctaggcgctgccagcccgattctcctctgctctccacccccgcctcacccagtggccggccggacctgcaccccgcgcttgaccccgctcatcctccccccgcccggccgggcgcgctcctccccggccggcccctcggcgcgcggcgcgctggaggcgaacgcgggctgaggcgaacgcgggctgagccgagcgcagtggccgccgaccaccgagcgccccgcgccgctccctgcatgtgcggcccgcggcggctcgcagctcccggcagcagcctcggcagcttcggccgcgcctcgagaggcggccgcagaggctccagcggcggccgagcggccga

SEQ ID NO: 5374 - DNA, 600 bp, Homo sapiens
ggactctctttacttcggctaggcaccggctcggttcatcccgcacgcggggcggcggggctgggctgggaaaaggtcttagcggggtgcaaactcagagagccagcgctgtttgggaaagcagcaggttaaagatgctgagtcgggttggaagggcttctctcgggcagcgtatgacggcttgagggagggcaccaggcacagggagcaggacttggcgctgctcaggctgcactctccacgcgggcaccgtaaggccgggcgcgaccgggaggccccgagagaacgcccggccccagacgctggagctgctctctgccccctgctgttgcctctaccgcaaatgggtttgagactggcagagtcaaaagcccggctggcttgggaaaactcgggccaagcaaagggaatgtcctttaagggtgaaacctgaaatccagccccgcatgatcccgcacaggcgagctgcatccgggaggcgcgagcttcagtgcggaggccagtgtcaccttagaggagctctccctattggctcttaaacgcccagaaaagtccagtttcccttccccatcctcaccgaccaacctcgcgacccatgaa

SEQ ID NO: 5375 - DNA, 600 bp, Homo sapiens
ggctcacaggcagtcacacacctatacgggctgacaccgctaagtgaacaggtgcagacacaatggcactcggggacgggctcacacgcggtcacacacctgcaggaacacgcgcacactacacaccgttgctctcgcctcccggtatcaccttcgaacgcgctggccggccccctcctagcctggtgcagtcggctccgcttctactcagtctcgggtcctcctgggccaacgcagaccctggtgcctccttccttagacgagctaaggtcaagacttctgctgctgcggaggagcccgcgcaccaggccggggtggactgcgcctgcgcatcgggcccgcctggttcttaggaactacgactcccagggggcgctgcgcgctcgccggcaccgcgactaaagcttgcaaagcctgggtcatcgaaactacaactcccagaaggctaagcgtctgcacacgctaggtccgcagggcgctgacccctgggggcccgaggagcgccgggctgctgccccgagccccgcccactacagcctcagtgcatggcggtgggcgcttccagtaactcaggggtgggacttttttcttgctcagggg

SEQ ID NO: 5376 - DNA, 598 bp, Homo sapiens
aggggctttccagacgtgagttatctttacctttccttgactagctaattcaagacaactaggtagaagccctttctcagcctcccctcttcgctcatctttcgagttcttggccaccccagttcaaacaccagcaccattgccctcctctcaggtggctgctgcttaatttcccctccactttagtagttcttctcttgcctcgctagaaggactggtgttgggtgcttggaattctggctattttcctcctgccgttccgactcggcaccagagtctgtctctactgagaacgcagcgcgtcagggccgagctcttcactggcctgctccgcgctcttcaatgccagcgccaggcgctcaccctgcagagcgtcccgcctctcaaagaggggtgtgacccgcgagtttagataggaggttcctgccgtggggaacaccccgccgccctcggagctttttctgtggcgcagcttctccgcccgagccgcgcgcggagctgccgggggctccttagcacccgggcgccggggccctcgcccttccgcagccttcactccagccctctgctcccgcacgccatgaagtcgccgttctac

SEQ ID NO: 5377 - DNA, 600 bp, Homo sapiens
gagccgccgagctcctccccgcccgcccccacaccccacccccaccgctgcactaaccccggctcagctggctccgcgcacttgctcggaggagccggggccgagcggaccgccggctgcaggcagcgagcgcggctgggctgcggggctgcttccccgcgtcctccgggcccgggccgccctcctcccgcacagtgcggagcagggaggccccgcgcctcgaccacccgcgcccgagcgtccgcgcctcctcctccgctctgcaggcggggaccgcccggcgctcggcacccggcagcgcggccccctccagcccccggctcccggcagcagaagcagaaggcagcgccaggggccgccgccgccgccgagctccgcggggctcgggagccggccccggcgaggaggcgcggaaccatggccgatgggggcgagggcgaagacgagatccagttcctgcgaactgtaagcgccgtgcgtcgcgtgtgctgtcaggggaagggggcgtcagggcatccactagcggggtccgggcagagtgacagcgggcagcggggactcgcgggcggggcgagggggtgccccctgaggatgcgggag

SEQ ID NO: 5378 - DNA, 600 bp, Homo sapiens
tccttgactagctaattcaagacaactaggtagaagccctttctcagcctcccctcttcgctcatctttcgagttcttggccaccccagttcaaacaccagcaccattgccctcctctcaggtggctgctgcttaatttcccctccactttagtagttcttctcttgcctcgctagaaggactggtgttgggtgcttggaattctggctattttcctcctgccgttccgactcggcaccagagtctgtctctactgagaacgcagcgcgtcagggccgagctcttcactggcctgctccgcgctcttcaatgccagcgccaggcgctcaccctgcagagcgtcccgcctctcaaagaggggtgtgacccgcgagtttagataggaggttcctgccgtggggaacaccccgccgccctcggagctttttctgtggcgcagcttctccgcccgagccgcgcgcggagctgccgggggctccttagcacccgggcgccggggccctcgcccttccgcagccttcactccagccctctgctcccgcacgccatgaagtcgccgttctaccgctgccagaacaccacctctgtggaaaaaggcaa

SEQ ID NO: 5379 - DNA, 600 bp, Homo sapiens
tcaggggctttccagacgtgagttatctttacctttccttgactagctaattcaagacaactaggtagaagccctttctcagcctcccctcttcgctcatctttcgagttcttggccaccccagttcaaacaccagcaccattgccctcctctcaggtggctgctgcttaatttcccctccactttagtagttcttctcttgcctcgctagaaggactggtgttgggtgcttggaattctggctattttcctcctgccgttccgactcggcaccagagtctgtctctactgagaacgcagcgcgtcagggccgagctcttcactggcctgctccgcgctcttcaatgccagcgccaggcgctcaccctgcagagcgtcccgcctctcaaagaggggtgtgacccgcgagtttagataggaggttcctgccgtggggaacaccccgccgccctcggagctttttctgtggcgcagcttctccgcccgagccgcgcgcggagctgccgggggctccttagcacccgggcgccggggccctcgcccttccgcagccttcactccagccctctgctcccgcacgccatgaagtcgccgttctac

SEQ ID NO: 5380 - DNA, 600 bp, Homo sapiens
agatctgggcggcggcggccgaaagcagcgacgcgcccggagcatcccttgcgatacgctaggggacggtgctttctctgtcccagttgcgtgcggcggggctggggcccaggccgccccaaatctcccccactagagtgaccaccgcacagttgtccccgctgggcgcgctcctccggtgtctgcgctcagccgctctcctcttctctctcccgcccgcccgcagcgccatggtctggcagtgtgtttagcgctcaccaccatgtgcaccagcttgttgctagtgtacagcagcctcggcggccagaaggagcggcccccgcagcagcagcagcagcagcagcaacagcagcagcaggcgtcggccaccggcagctcgcagccggcggcggagagcagcacccagcagcgccccggggtccccgcgggaccgcggccactggacggatacctcggagtggcggaccacaaggtgacagcatgcccgccagcccgctcgccactcagcctggggatcccgcacacctgagccttccccctttcccggggctgggaggcgctgtgagtaggtgccgttcgaaggctggaggggagtggacc

SEQ ID NO: 5381 - DNA, 600 bp, Homo sapiens
tgcaaggatcgcaaggatccagggccccaggaaaggaggggtgtgaaggactcaaaattccagcagcttggctggggtggctgcgccagacgggcccttccccaaagtgcaaacccacccctgtcctcggccccggcgcgctccctccctcagcccggggccgtacaccacctgccctctaccgagagatctgggcggcggcggccgaaagcagcgacgcgcccggagcatcccttgcgatacgctaggggacggtgctttctctgtcccagttgcgtgcggcggggctggggcccaggccgccccaaatctcccccactagagtgaccaccgcacagttgtccccgctgggcgcgctcctccggtgtctgcgctcagccgctctcctcttctctctcccgcccgcccgcagcgccatggtctggcagtgtgtttagcgctcaccaccatgtgcaccagcttgttgctagtgtacagcagcctcggcggccagaaggagcggcccccgcagcagcagcagcagcagcagcaacagcagcagcaggcgtcggccaccggcagctcgcagccggcggcggagagcagcacccagcagcgccc

SEQ ID NO: 5382 - DNA, 600 bp, Homo sapiens
gcgctccctccctcagcccggggccgtacaccacctgccctctaccgagagatctgggcggcggcggccgaaagcagcgacgcgcccggagcatcccttgcgatacgctaggggacggtgctttctctgtcccagttgcgtgcggcggggctggggcccaggccgccccaaatctcccccactagagtgaccaccgcacagttgtccccgctgggcgcgctcctccggtgtctgcgctcagccgctctcctcttctctctcccgcccgcccgcagcgccatggtctggcagtgtgtttagcgctcaccaccatgtgcaccagcttgttgctagtgtacagcagcctcggcggccagaaggagcggcccccgcagcagcagcagcagcagcagcaacagcagcagcaggcgtcggccaccggcagctcgcagccggcggcggagagcagcacccagcagcgccccggggtccccgcgggaccgcggccactggacggatacctcggagtggcggaccacaaggtgacagcatgcccgccagcccgctcgccactcagcctggggatcccgcacacctgagccttccccctttcccggggct

SEQ ID NO: 5383 - DNA, 600 bp, Homo sapiens
tttctcagcctcccctcttcgctcatctttcgagttcttggccaccccagttcaaacaccagcaccattgccctcctctcaggtggctgctgcttaatttcccctccactttagtagttcttctcttgcctcgctagaaggactggtgttgggtgcttggaattctggctattttcctcctgccgttccgactcggcaccagagtctgtctctactgagaacgcagcgcgtcagggccgagctcttcactggcctgctccgcgctcttcaatgccagcgccaggcgctcaccctgcagagcgtcccgcctctcaaagaggggtgtgacccgcgagtttagataggaggttcctgccgtggggaacaccccgccgccctcggagctttttctgtggcgcagcttctccgcccgagccgcgcgcggagctgccgggggctccttagcacccgggcgccggggccctcgcccttccgcagccttcactccagccctctgctcccgcacgccatgaagtcgccgttctaccgctgccagaacaccacctctgtggaaaaaggcaactcggcggtgatgggcggggtgctcttcagcaccggcct

SEQ ID NO: 5384 - DNA, 600 bp, Homo sapiens
gccctcctctcaggtggctgctgcttaatttcccctccactttagtagttcttctcttgcctcgctagaaggactggtgttgggtgcttggaattctggctattttcctcctgccgttccgactcggcaccagagtctgtctctactgagaacgcagcgcgtcagggccgagctcttcactggcctgctccgcgctcttcaatgccagcgccaggcgctcaccctgcagagcgtcccgcctctcaaagaggggtgtgacccgcgagtttagataggaggttcctgccgtggggaacaccccgccgccctcggagctttttctgtggcgcagcttctccgcccgagccgcgcgcggagctgccgggggctccttagcacccgggcgccggggccctcgcccttccgcagccttcactccagccctctgctcccgcacgccatgaagtcgccgttctaccgctgccagaacaccacctctgtggaaaaaggcaactcggcggtgatgggcggggtgctcttcagcaccggcctcctgggcaacctgctggccctggggctgctggcgcgctcggggctggggtggtgctcgcggcgtccact

SEQ ID NO: 5385 - DNA, 600 bp, Homo sapiens
ccccactgcgccgggcgctgcggagagcggcgagggtgggcgcgaggcggagaacgcgatgaatgagttctcccctcgcctcggagttgtctgagttggcggcgctgcgcccaggcttccggctctcagcgccccacgcgcgcgtggctccccgggctgccacccacgcccgcggccggggccgagccagccacgcagggcagccgaggctccggagctcctgtcccggccccagtccgggtaaaaggagggttgtccccagcggaggcgcacagccgcgcgttctccctgcactctcttcgcggtcccatctgttccccatggcgtctcatccgcaaacccggatccaggcttacctggagaagaacaagatcggtcccctgtttgaggtaaggcgctgtggaggagggcagtcccgttgtctttaggggaaggggtgcagtaatgaaaacagaacactcccaatcccacccctcccagggaaggagggctagagaaccaacgcgcgggagagggcgccctgggattcactggcattcgctctgtcccggccaggtgtcctggaacgcggccgggcgggcacttagccagttacctgaa

SEQ ID NO: 5386 - DNA, 600 bp, Homo sapiens
gagcggcgagggtgggcgcgaggcggagaacgcgatgaatgagttctcccctcgcctcggagttgtctgagttggcggcgctgcgcccaggcttccggctctcagcgccccacgcgcgcgtggctccccgggctgccacccacgcccgcggccggggccgagccagccacgcagggcagccgaggctccggagctcctgtcccggccccagtccgggtaaaaggagggttgtccccagcggaggcgcacagccgcgcgttctccctgcactctcttcgcggtcccatctgttccccatggcgtctcatccgcaaacccggatccaggcttacctggagaagaacaagatcggtcccctgtttgaggtaaggcgctgtggaggagggcagtcccgttgtctttaggggaaggggtgcagtaatgaaaacagaacactcccaatcccacccctcccagggaaggagggctagagaaccaacgcgcgggagagggcgccctgggattcactggcattcgctctgtcccggccaggtgtcctggaacgcggccgggcgggcacttagccagttacctgaacgcggacaggtgagctcgggaggg

SEQ ID NO: 5387 - DNA, 600 bp, Homo sapiens
ccgcctctcgaaccctccttgtcgcgttcttcccgccccgcacctttctcctcgcgtttctgggaagtcagaagcaaaccacgagaaaatgccttcgcaaggagcctccctacacccgccctgtcactgaaacaaaagcgtagggaggagggaggtgggagaggaggcgggaggaaggtttagaaagacgatggggacagcagtaggaaggagctggggaggggggtcaaggtggcaagcagagctgggggcccagagtccgctcccgtgccgcgcggcgagtcgcttacatgcccaggtcgctgtaggtgttgaagaactccatctgattgcacgcctgaatccagcccaccacccaggtctcgtggcgggggatggggggcatgaccacgcgggcggaggctttgaagtagggggtcttgtagcgcaggacgatgggcgaggtctcctcgatgcgcgtggggcactggtcgatggtggcgcacacatcgtacaccacgatgttctcgcgccggatccgcgccttgcaggtgatgctttggatacagcccatcctgcagcccggtgccggcacggcgcggcgtggggcagcgcgggggc

SEQ ID NO: 5388 - DNA, 600 bp, Homo sapiens
gccccgcacctttctcctcgcgtttctgggaagtcagaagcaaaccacgagaaaatgccttcgcaaggagcctccctacacccgccctgtcactgaaacaaaagcgtagggaggagggaggtgggagaggaggcgggaggaaggtttagaaagacgatggggacagcagtaggaaggagctggggaggggggtcaaggtggcaagcagagctgggggcccagagtccgctcccgtgccgcgcggcgagtcgcttacatgcccaggtcgctgtaggtgttgaagaactccatctgattgcacgcctgaatccagcccaccacccaggtctcgtggcgggggatggggggcatgaccacgcgggcggaggctttgaagtagggggtcttgtagcgcaggacgatgggcgaggtctcctcgatgcgcgtggggcactggtcgatggtggcgcacacatcgtacaccacgatgttctcgcgccggatccgcgccttgcaggtgatgctttggatacagcccatcctgcagcccggtgccggcacggcgcggcgtggggcagcgcgggggcccgcgcgggcagccgggggcgcccgtcacgccgg

SEQ ID NO: 5389 - DNA, 600 bp, Homo sapiens
gcctcagcttcctgagcctgaatcaatgcttctaatcacgtgggcgctcagccgcgacgggaccacagaaatcgaccagcggcctgtttaaggagcgacaaggcccagccctctcctgcattgtggcgacgccatttccctgcgcccccagcgcggccgcttggcttttgtttgaggtgacgctgggcggcagcatccttccctcagccctggggaccagcggggactacagaacccagaaggttttgtctccagccgcagggatgctgagccaatccgcgctgagaaaagggtcgtttccgctttgggaccaatgggtcggggagggacttccggtatcacttcagtggcggtcatttttgcagcgcttgggtgcatccagaccgtcagagctttgggagcgctttgtttggcgacagtcggaaggcgcgaggggaggggtcctcccgctgaacagtgggggttctaagggtcggcggcggcggggttgacggctttgcctaggtccctccgcccgtagctgtcgggtcccggccccgctctgcccacagactccgatggctgcggccgcgctgagggccccgactcaggtgagcgctg

SEQ ID NO: 5390 - DNA, 598 bp, Homo sapiens
ctcctctcaggtggctgctgcttaatttcccctccactttagtagttcttctcttgcctcgctagaaggactggtgttgggtgcttggaattctggctattttcctcctgccgttccgactcggcaccagagtctgtctctactgagaacgcagcgcgtcagggccgagctcttcactggcctgctccgcgctcttcaatgccagcgccaggcgctcaccctgcagagcgtcccgcctctcaaagaggggtgtgacccgcgagtttagataggaggttcctgccgtggggaacaccccgccgccctcggagctttttctgtggcgcagcttctccgcccgagccgcgcgcggagctgccgggggctccttagcacccgggcgccggggccctcgcccttccgcagccttcactccagccctctgctcccgcacgccatgaagtcgccgttctaccgctgccagaacaccacctctgtggaaaaaggcaactcggcggtgatgggcggggtgctcttcagcaccggcctcctgggcaacctgctggccctggggctgctggcgcgctcggggctggggtggtgctcgcggcgtccactg

SEQ ID NO: 5391 - DNA, 600 bp, Homo sapiens
cttttcttctctcgcactccacctcccactgccccgcaccccctttagcccggtgttccccgctccgctatgattgacgtctggaaagaaagagctttgtgaggggatgattgttattaacttgttatccccggcgggggggcggggaaccgacgtgcccgggtgagcgccggagacccggagcccggggagcgcgggacgagctaccagcgctcgggtggcggccgccagcggccagcgaaggaggctgcgcgccagcccgcccgcggcgcccgggctcaggcgccgtgacggctgcacgcgctgccccgcactctgagggccttcattagctcgctccccgcgccgaggctggggcgggcagcacgctcggaacttctgatctgtttctccatactttctccccctcctactccgcagtgtcaggggctcatgtcagaggagtgcgggcggactacagccctggcggccgggaggactcgcaaaggcgccggggaagagggactggtgagtgcggaggggctcgcgtgctggcaagactggccgtggggaggcggcgcaggacgaagggccgctgtccccgcgctccttccagggccc

SEQ ID NO: 5392 - DNA, 675 bp, Homo sapiens
cgctggtagccgggcgctgccattcactgcaaggtcctctgcgccctggaattgccgcggcggcggatgcagaggccaacccagagtgcaaccatggagacgcgacgtgtgtcccatagtaacctgttacaacattatttataagctgccatccctagccttcccccgcttcccctccgctccctcgccagacttgcgggcgacgggcacagccgcgtctggctcttcccggcctctcccttctctcgcgggcgcagccgatcaatagttaacacccggctgcggacggcggctccatccgcggcaatcaccgtagtgcttgtttgtggaagccgagcgtgcgtgcgccgcgcgcgcacccagtccagcgcggagtgggcgtctacccgaggaggggtgtctggggaggggctgccctcgttacccaaacagtttgcgctcgcttaaccttgatgcagctcgaggcttcccagtccagctcagttcagacagaaaacctggcgcgcgcgcgcgcacacacacacgcctcccctggcgtcgccgcccggccgggtccctgcccttagggaccagagcggcgaccgctgcaccccgcaccgcctgctggaggagcccccggagccggggccgagccgccggcgtccccgagtgcgccccctgtgcgtgccgccgcgc

SEQ ID NO: 5393 - DNA, 600 bp, Homo sapiens
gcaagcaacaactttgaggtgagcagcaagttgtgcacctcctctcaaggcgctggatcagcacccctgagctgcccccacagcacacactcccaatgcgaggcggcggcggcagcaacagaggcagcagcagcaatcgcggcagcagcggcagaggcggcggcagctgcgcgcctcgggcccaaccccgctcggctccccctctcgccggcgccctgcctgtcttgcgtgtgcgtgtgcgtgtgctcagcctcagcgtgaggggcacctgctcgtctgggctcacagcgaaggcagcctcgccgcgagctgccgctgccgctgctgccgccactggtgttgccgctctcaggcgccaggctccccgtcgccgccgccgccgcctcgccagccagagttgggctccgtgggcttcccccctcgcagcctcggtccttccccgctgcctgcaagtcagcctggctccgagtcacgtgtcagtgcctgaggcagagactgcgagaaaaaaacgcgcttcattccttcttccaccgccatactgtattttatactaaatctcatttttattccaacattttactcccgctcggtgagtacctt

SEQ ID NO: 5394 - DNA, 600 bp, Homo sapiens
ggatgaagcccaccccgtccccttctggtaccaaagtgcttactcctctccaaagtgccgtgtctgaactgccgctgggaagaagcggctcctgagacgcgcccacacctttcacctgccgcgcgcttccccctcctcggccaccttcccggcggaagcagcgaggagggagccccctttggccgtcctccgtggaaccggttttccgaggctggcaaaagccgaggctggatttgggggaggaatattagactcggaggagtctgcgcgcttttctcctccccgcgcctcccggtcgccgcgggttcaccgctcagtccccgcgctcgctccgcaccccacccacttcctgtgctcgcccggggggcgtgtgccgtgcggctgccggagttcggggaagttgtggctgtcgagaatgggggtctgtgggtacctgttcctgccctggaagtgcctcgtggtcgtgtctctcaggctgctgttccttgtacccacaggagtgcccgtgcgcagcggagatgccaccttccccaaagctatggacaacgtgacggtccggcagggggagagcgccaccctcaggtagggagctgacattgt

SEQ ID NO: 5395 - DNA, 750 bp, Homo sapiens
tgccgcaggtgagcgatgtaactggaagccagccggagcgtgtccagcttggagagcttagtgtcggggggcacccagggcaggctggtcttgagcctggagaaggctttgctcagcacgcgcatccgggcacgctcacgggcgttggccgcgttccgctgcgactgcttgcactctgcggctgagcccttggccgggaggggcttcttgccaccaccgcccgcgctaccacctgcgccgccgcccccagccacacggggccgcttcctcttgcagccttccgcgctgccggctgtgcccagagcgcagcgctcctcctcgccgtcggggtcctcctcctctgccgacgagttgtcactgggcgaggcgtagctgcgctctacgccgcggaggggcggcctcttggaggcggggaccgggtactcccgctgcagcccccgaagctccatctcctccggatcactcaccgagcccgtggacatcccgttgtcccccttgcccacacgcgtcctctttcctcccccctggccagtctcgctgtctccgccttccgctccctggcggaggcggaggccagagagcgctccaaggaagactaaaaacccaggccgggaagcgcggggtgagaaagcgaggtgggtggcgagagcgtgagcgcccctctgctgaccccggggagcgtggactacgagttggcgcccaagtccagaatccgcgcgcaccgcggtaagctgcgccttttgaaaaggc

SEQ ID NO: 5396 - DNA, 667 bp, Homo sapiens
gggtcggctgtccttccccactggtcacacaagagcggccgtccttccccagctcgaagcccgtagcacattcgcaggcaaagcctcccaagtcgtctaggcagttagggagctctgcgcatttgccagcacggaggtacctcccggggcagggacacaacacatcgcccgagagtttgtcccagcgagcgccgatttcgtccgcgatgcaagtaactgagatcgggagctgtccccggcagagcgcactcacctcggtcccaggtggactgaagtccagagcggcgctgtgcagctggaagggcgcgcgatagctcaagttagaggcggccccggggcgcggcgcaggacacaagacctcaaactggtacttgcacaggtagccgttggcgcgcaggtggcatcgcatctccttccagcctgcgggctcgaccccaccggtggcctggagtaccgcgcatctccgcgcggtgcaggagcgttggggctcctccacccactgcagcgtgtcgctttcgagaccgccggggtcggaggacagccaggagaaaccccgcaaaggctcgttctccagggtgcagtgggaacgcctgcgctccagtgcgacccagaacagcaggtctttggagccccctccgggccctgggcctgcccgcaggagcgcgag

SEQ ID NO: 5397 - DNA, 600 bp, Homo sapiens
ggtctccagggcggaaaggggtggaagctgaccctcgcccttccctccagcgctggcttcaggtgtgccttctgctacctcctgtactgcgaacaggggcccgccgagctccgggagcccctagaagaggaagactcctctggccccactaggtatcatccgcgctctcccgctttccacctgcgccctcgcttgggccaatctctgccgcacgtgtccatccctgaactgcacgctatcctccacccccggggggttcctgcgcactgaaagaccgttctccggcaggttttgggatccggcgacggctgaccgcgcgccgcccccacgcccggttccacgatgctgcaatacagaaagtttacgtcggccccgacccgcgcgggactgcagggtccgccggagcgcggcgcagaggcttttcctgcgcgttcggccccgggaaaggggcgggagggctggctccgggagcgcacgggcgcggcggggagggtactcactgtgaagcacgctgcgcccatggatcatgtctgtgcgttacaccagaggctccgggctccactaattccatttagagacgggaagacttccagtggcggg

SEQ ID NO: 5398 - DNA, 600 bp, Homo sapiens
cagcagcctgctgaggagtggggacgaagagcagcctaaacttagggctcgggatatttcgatgccacccaaattgccgtcctaccccaacgaggcagggaaaggagcggagcgcgcgcgcgagctgagtgagtgcttacgtcgcagcgagatctgtgctgggataattagagaggagttgggctgagccgagtcctctttcagcagcagcagccggagccgccgccgcagcccggtggggcaaccctgactcggaccgctcgggagagccccaggagaggccagcgccgcgcagcagccgccccgctgcgcccacctccccggctgctcccggagggctcacaaaggcggtggccgcccgagtggccttctccatccaggcgttcgcgtcctcctccccaccttctctcccgaaggcgaaaatggcagggccaggcgagaacctgggacagcggtggccctagccctgcgatcctcacccctcctgctaggagaggctgcgggctgcccgcggacgatgtggccgcggctgctcccgagcgcatcttcggcccgggtccccgccgccacccctcttctctgctccttccatcccgccca

SEQ ID NO: 5399 - DNA, 600 bp, Homo sapiens
gggtgcagaagcgagactcgagagtccaccggccaggggcgtctgtccacgggtctgcacgggagcgcaccgccgctcggcccgggggcgtccgtggcgctgggagcgagagcttcggcggcggctgcgggcagggcgcgcggagcgggctgcaggtgcgggcggaggccggcggggggcgccgggggcgctgcgcggcccttggcggcgggggcgcgcggggtggcgggggaggccgaggcgccggcagcttcgcgccggcggctggaagcgggcgggctgcacgggcggctcgagtgcggggaccccagcccctcgccctcgtgagcgccgcccctgccacctgctgccaagtcaccggactggggatgcggggggcggggtgcggggagaggaaagcgccgcgggtggcacggtgcctctggcgacagagtagatggacccgaaagagacccgaggtgacttcgggctgggcaggacacccccgggagttgccagcggctctcagcgggcgcctctaggaccccttgtcactgcgagcagcgcctgctctggggaggggctcgaaggcgccgcgccttctcaacgcgccgctgcgtc

SEQ ID NO: 5400 - DNA, 675 bp, Homo sapiens
atcattgttgttggttccaggaggagcgaagcgcctggagatcgggcgcgcgggcgcggctctgggagcgggggaaggtgaggggaaatgggacatgatggcattaataatcgttaccaaagacggtgggagtaacaaaggaatgcgtctccgagacgccgcccagccccggggtgttttctggcgcggtcgcggtgcaggaacgcgagccccgccgccgagcctcccgccgcctgcgttcgttggcgcggcgcccggcggtagtgccaccccgaggccgagcgctgcccccgccggcccgcggctgccagccggccctgcccgcgcccgggccccgcgagcggccgcacttcaccttacggaggggagataatgagatcaattagaggcgccgtcaccgcgccggagacagctgccgccgcatagtaatcacccgcgggctgggtgcgcgggggctccccgctacctgcgcgcctgctgctcccaccacgcggcaccgacccgggcgcgcccccggcccctgtccgcagcccacagccacaccgcgcaccctacaccctccttgcgcctctgctggggagctcaccccctccactcgcacagtgcgctgcggcccggggtgtgggaggtcccgggacttggggtgtgagtgcctgtgtgggggtaggggcaggt

SEQ ID NO: 5401 - DNA, 600 bp, Homo sapiens
tcctccttcaaaaccaaaccaaaccaccaccaacaaaaacttctgtgctactctggcttctctggttttgtttgggaacagtggaaccaagttagcccgggccagggcgcagatgatggactcagagcgcccagggaccctagagagaggagcactcctcaagagccccctggccatcacccgagcgccctggagcgccatcacccgaacgcgcgctccaggccctcgaacaaggcctctggctgccagagcgagtgaggggcgcagaggcggcagagagcggagagccccggtgtctccgcgagggcggcggcggccagcagacggcgatcgaggcgcgcgccacggcacggccagcgcagacacgccgcggggtctcgggccggagccgtgcagccgggcccgctgcctctttgcccctcatggctccgcgcgggaggaaaccgggccttctccgcccgccctcctctcgctgcggtgtccccagcacccccgccccgcccccgcgcggtccccaccgtcgcgctcccctccctcctcgccctcgctccgcgcctcctgttggcagagatggcctcgaaggcctcttccaatttgaat

SEQ ID NO: 5402 - DNA, 600 bp, Homo sapiens
acacacatgcacacattttctcgcgctctctccggctctcctttgtttattttctaatctatatttttactggaagatttcctctttattctctcccgccctcctacaagcgctcttgctggccgtctgggtgcacacaccgctccctcgatcaccccagcccccttcctggtctcccgagcgcggggtttgaaggtcacctcctttccagtccccgtgcgagccgcgctgccgccgcctcctccagccagagtcggtgggactggctgcgctgccctgaagtggttctccaagcagcgcggagggtggcggacggcggacggagcccaggggccgcgtcgggtggggaaacccgaactcgcggaggggaatccctccccctccgccccagccccccagcagcacccgcggtggggcgggggcgctctgccagccccgggaacagcagaggcggcggcactggctggacccacgcgcgcgcctccggggctgaagaaggaaggagtgagccgagccgagcaccccacatctggaggggacagccagccgtgggccccgccccggcgtccggagcaggagaactccgagcttcttgcccag

SEQ ID NO: 5403 - DNA, 598 bp, Homo sapiens
gtgcccgggaaccgctcgccgaaggaggaagcgccgtccgtctgtccttccccggcggcggcggcgagcggagcgcaggagccccgcactccacacactcatgcacacacacactcacacacactcacacactctcccacaacacaataccctgacacacactcacacgcacgccgcactcacaccgggtgcctgggaaaatcgcagacgccggggaggagcagggggcggtgatgggaaggggagctgcgaggcgaagtgttcttcagggaagcgggctcgagtctccgcagctgcggcggcggcggcggcgcgctgggccggcggcgggcgcgggcagggggccgggggtgccgcgcggtaggagcctggcttggacagccgaggagcaggaagtggcctctgacccaggacaccgagcagggctctcttgcctggattcgcctttacaaagtaactcgcgaaggtccccggaggggcgtcaagcggcgacagcggcccgcccgcccgcagtccgaagcccccagccctgctgtcttgccttcccccattccatcagttgccattgcaacgccaatcctgttacacgatacagact

SEQ ID NO: 5404 - DNA, 600 bp, Homo sapiens
ccctgcgcaacgcctcctcgtcctccgagattttccaatggtggcgcaagctcctccctcgcccgagctgggcgccgtcctagagccaagcgcccgctagagccgagactagggggcggtgaggagtgggacccgctcgcggccattggttgtgcggccaggaggggcggagggacgacgcgcgggctgtgcggggccggcagcccggatccactcccgctgcgcctgctgtccgccgtgcgcccagactgcgcgccgcgccgctgcgcccaacattcccgaggacggcttcgcgggcgcgtatcgtccagaccggagcaccgccccaccgctagcgcaggagacctgccggggaagtcgcgtgtcctgacctgcaggtcagtgagggaaacttgcagggtcccgagctctgggggtgaacttgccctacgcggagagcgccccactccttgcctggggcggcctcgggtcctggaggcgagccgcctcccagactctcccccgagatctgggctcccggagatgtggctcctttctgagaaacacccccaaatctatcccttttgaggtgtccttactgtcccgagaagcaatcgcagc

SEQ ID NO: 5405 - DNA, 600 bp, Homo sapiens
ccggcacagcaattaacattggtccaaacggtgtcagtgaactttagctgcaaagaaactacctcatttaaaatttaagcagaccacagggagtagcattggaggaaagagaggagattttctccttcaacattttgagcatactggaatgccaaccccctaggtaggtgccagggccaccacaggaacctgactcgcaggagtcgtcctccgtctctacgcgaagcgccccctcgaggtgggcagggggtggcggcggcgacggtggcggagccgcagagcgagctagagagcgagagcggtgagactctgcggacgtcttcccgcccgccgcgctccgccccacccagcctccgcagcctcgggccggatcgcccggcggggaagatgcgcctcaagaaccaggtagaagcgcctcggcgcaggccccgcacccccgactctgcccgccctctgttacggacacccgctgggccacgtggtcgcgactggcttctcccagcggccagcctggccaccccgactcccagggagggggagagggcccttgcaagaggatcctgcccccgcgctgcccagacctgagggctcctggcgacc

SEQ ID NO: 5406 - DNA, 600 bp, Homo sapiens
cttcatgcctcagaaacgtggcctactctgcattcggtgtgtgcggaagcagcaatcacagaggcagccctaataccggaggcggcggcggcagcagcagggccaggtggtagctcggggctgaggatcgcggcgggggcagccgctatggggcccaagccctgacacacgtaccattcgctcaagtcggcggtacgcgccgccaccgccgccgaggaggccacctgggacttgtggccgcagtccgacgagggcgacacgagggcagacggtgtagccgaatcgtagccagagctgggcggcggcgagcgcccgtgcaccttcatgtgcttacgcagcgagctggggtgcgtgtagcacttgtcgcagccccgcaccttgcacgtgtatggcttgtcgctagtgtgcacgtgcgaatgcttcttacggtcgctgctgttggcgaagcgccgctcgcagccctcgaactcgcatctgaagggcttctcgcctggcggaggcaacgcagagacattagtgcttgtgggtcgtgttcccgtcaggtgcttgccaccctcccccattcgtctctcattttctggaaaagaactacaaaatatt

SEQ ID NO: 5407 - DNA, 675 bp, Homo sapiens
acaagtgaaataatgaggaagcgtgcagagtgaatgccaagagaaaaggcacaaaaaccctattgagaggccccggccgctcctggcgtagtccatcacatggcaatagtcctatttaagccgcgccgccggcgcctttcagcaccactagcgctggccagcaccccgcgctctttgggcggtgcccacggcagcagaggctactgtttcagcctaggtctcagccgcgcgttcagcctcctgggcagaggcagctgcgggataccgcggccagggaaagcgcgtggagagccgaaaggtgcggtgggcgcagagggcgggctggctgcggggcgaccgcgcgccggggccatgccgcgctccttcctggtggactcgctagtgctgcgcgaggcgggcgagaagaaggcgcccgagggcagcccgccgccgctcttcccctacgctgtgcccccgccgcacgcgctgcacggtctctcgcctggcgcctgccacgcgcgcaaggctgggctgctgtgcgtgtgcccgctctgcgtcaccgcctcgcagctgcatgggccccccgggccgcccgcgctgcctctactcaaggcttccttcccacccttcggctcgcagtactgccacgcgcccctgggccgccagcactctgctgtgtcgcccggggtcgctcac

SEQ ID NO: 5408 - DNA, 600 bp, Homo sapiens
ggaccaatcaccggctctgagaaagttcggcagtggccaccacatctggttctcgttaacttttctaaggcagcggccgctggagcagcggggctggcggggtaaaagctcctggccagggctgcctggagctgccccttccactccgcccccagggagctcccgggtcatcctctcatccgggctgccccgcggcccccaaggagccccacccccgggaccaaatggcccgcaaggtttggggcagcggcgttgcaggagatgagctcagcgcaaagggaaccccgcagcggcgagtgcggctgctggcctgcgcgctgtggccccaacaggctggcagggcgcgggcgggtggcggggttgcggtatgagctttgctccctgccctggggtcccgggcgctcctggctctggaggcctggccatcggtccgaaaagcaaagggacattgtcgtggtcccctcggccgcttcgctccacccagagacgccctgaggagaagcgagcctttgtacgaaggcagagggctgactcctaagttctgtccccctcccgaaggccggccgctagggaagacttggccaccctctggaagtacct

SEQ ID NO: 5409 - DNA, 600 bp, Homo sapiens
ggcgctggtgctgctggcggtgcgcgacccgcgcctgcacacgcccatgtactacttcctctgccacctggccttggtagacgcgggcttcactactagcgtggtgccgccgctgctggccaacctgcgcggaccagcgctctggctgccgcgcagccactgcacggcccagctgtgcgcatcgctggctctgggttccgccgaatgcgtcctcctggcggtgatggctctggaccgcgcggccgcagtgtgccgcccgctgcgctatgcggggctcgtctccccgcgcctatgtcgcacgctggccagcgcctcctggctaagcggcctcaccaactcggttgcgcaaaccgcgctcctggctgagcggccgctgtgcgcgccccgcctgctggaccacttcatctgtgagctgccggcgttgctcaagctggcctgcggaggcgacggagacactaccgagaaccagatgttcgccgcccgcgtggtcatcctgctgctgccgtttgccgtcatcctggcctcctacggtgccgtggcccgagctgtctgttgcatgcggttcagcggaggccggaggagggcggtgggcacgtgtgg

SEQ ID NO: 5410 - DNA, 600 bp, Homo sapiens
ctccagcctttctctctgggcctagcgggactctcccaggcaggcccctccctgcccgcgggcgcactttccccgcctgcatctgaggcgtggcgcagctgggagcaaagcacaggtgggctgggcgcggtttggggttcgggcgtggcagagtggcggcggggtctggggaagagttgtcttgggggcagcgccagccaccagagcccgagtcagcgcggccaggactctgcaggggcaggtagcgacccttagagacgcaacgtggcgcagcggactcggctgcgtggggcaagggccggggccggacacaggagcagcggggatgccgggtgcgctccgagggtgtggcccccgggctgtgcggggctcagagctgcttgctgggcgcggtgcccgacaaaggtaaggcaggagtgggcgtctttctcgcgggacgctgggtcggagggagcttgaacttgaggttgttggggagagccagaaaggacgccagtgccacaaggagcgcctgccttggggcgtggagccgctcctcccctcactgggcagacccggccagcaaccaggtaggagagtgggggcaaatgtggccattct

SEQ ID NO: 5411 - DNA, 600 bp, Homo sapiens
ctgttgacttatgcaactggggagagggtttttttaaccgctttgagatattggtccatcccttttctctcagaacgtcctcaagggcacgtaagagttggaggtgacctccgggagcgcctaattttgagccgcggaacttcggcccacttctccgaggggaccaggcgcgcgccaatacgcatgtgcgggctctgagcgctcagagcgcgcctcttccttcccggctccccgcggtgcgcacccgctggccactctgcgcacgcgcgccgggtgccccggcctaaggccgttgacctcgggttctccccggcacagtcgaatccacgccagggccctcaggccggtagctgtcctgcagtccgagcggagctgcgacctcgggcagctggaagcctgtgggctgctgcttctccaggcaggcggcggagggatgcaggcaggatgagcggcggtcccttcgccgccacccggagaaccgcggctggtgcccttgaaggccctgggatgcctgggttgggtgggtgagtgaacgagaaccctgagtgagtgaggggagggcgggtcccctcctggcttcaaattcaacccaatcagctc

SEQ ID NO: 5412 - DNA, 600 bp, Homo sapiens
aagggggaaggagggtagggtagaaggagggcgggggagagacccatcgcctcatcttacatttcccctcccaagctcatttagtgggaacctctgctgggctcctgcgcgcctccctccccaccccctcaactctgggcgaccatctccccctcttcccttgctcaccccccacccttcctgctcttccgtccctccctaccgcgtgcctcctcccctccccctcgcctccctcccctccagcggcagtagctgtagcagcttcagcgaagccggagatgggcagagagcgcgcgcggcgcagcagctccagattcactgctctcccctgcagctccccgcgcccccgccgctgtcgctgcctcggtgtcccccagccccagtcgcgctcttaggacagcgccgccaccgccgcctggccctgcctgcctcctgcgccgcgcagccctcgcgagcgccccggatggcgctttacccctaggaccggtgagtaggcgggagagtgcagggggtcgggcgtcaaagcttggcgcggagagaacatcttttggtttgggaggcaccccaaaccagctgctgtgattccccgtcctccaggca

SEQ ID NO: 5413 - DNA, 600 bp, Homo sapiens
tcgggggaagctcagactcctaaactcgcactctccgtgctttgcgccgggacccctggccacccccggcgcctactatcccgccctccctccccgcgcgccccgccgctcgccgggacagccccgcgggccatggagctggcggtcgggaacctcagcgagggcaacgcgagctggccggagccccccgccccggagcccgggccgctgttcggcatcggcgtggagaacttcgtcacgctggtggtgttcggcctgatcttcgcgctgggtgtgctgggcaacagcctagtgatcaccgtgctggcgcgcagcaagccgggcaagccgcggagcaccaccaacctgttcatcctcaacctgagcatcgccgacctggcctacctgctcttctgcatccccttccaggccaccgtgtacgcgctgcccacctgggtgctgggcgccttcatctgcaagttcatccactacttcttcaccgtgtccatgctggtgagcatcttcaccctggccgcgatgtccgtggaccgctacgtggccatcgtgcactcgcggcgctcctcctccctcagggtgtcccgcaacgcgctgctgggcgtg

SEQ ID NO: 5414 - DNA, 600 bp, Homo sapiens
ctccgcgccccctccccgcccctcgcggctcccccaccctcgcgttcggcagcgccaggctgcgctctccccggtgcacacccggccgcgccgagaactaaatccgcgggctgaaattacgttttaaaaattaacatgttgaagcgtgtgccatttagtgagaggtgttttgggcaaagaatcaatttaactgtgactgaccgacgggcttgactgtattaattctgctaccgaaaaaaaaaaaaaaaaaaaagcaatgagccgcaagccttggactcgcagagctgccggtgcccgtccgagagccccaccagcgcggctcacgcctcagtctcgccgccccaaggtgggatccgacgcccaaaggagggcgccccaaggtgggatccgagcgggccgccctaggaggagtgaaccccgcccgggcgcacagctccgtgcgcctgtcctccctcctccagcgaaatcacacccgctttgcctcctcttgcagcaccgcgcgtgcctaggttctcggtctgcgcagctgggagtctcccccaccagcgccgcggagccgcccgcttccgctccctctttccgcgggtttgagcctcccgt

SEQ ID NO: 5415 - DNA, 540 bp, Homo sapiens
ataccaggtgttgcgtaatctctacttggagattagccaccccgtgcgcccaggtgaaagatatcattcttccgtgcgatccgaagtgccgtggaagttagtgccctagcccagtccaggaggaaggggcgtcgtgccggcggttttaagctcggaaggggcaggggaatgagcccagggaccccagcggggcgcaggtaggaggctgtgcgctcgccgggtgcgctccggccccgattcccagcgcagccagtaagtggcgctgggcctcgggtttggcggcccggaggagcgggctgcggattacctgcagcagcggggagccgccgagctcctccccgcccgcccccacaccccacccccaccgctgcactaaccccggctcagctggctccgcgcacttgctcggaggagccggggccgagcggaccgccggctgcaggcagcgagcgcggctgggctgcggggctgcttccccgcgtcctccgggcccgggccgccctcctcccgcacagtgcggagcagggaggccccgcgcct

SEQ ID NO: 5416 - DNA, 600 bp, Homo sapiens
caggtgctcaggcagaagtcagccgactctgggttcgagtcccagccccactgctggtcagctccttcttatacctcagttttccagctgtaaaatgggactaaggccattcttgtaggccaatggtgaggatgggaaatacgcacgtcattacccgatgggacggtgccagctcccctcgtccaccgacgtgggcccgagctagggttctgagccggatccggggggaaccgcgcgtctagggctggaaacccgccgccacagcgggctagaggtcgtccccgcccgcaacatatgcgcgaaggaaagtgctacgaacgtcaaatggccgccccccgccgacgccatctgctctgcgaagcagaaacggcggcagctgcgcgcccagtccctccgcccgcgccccgcgcgccgagtccggatccgccgcccggcggcaccgcggacagcgccagccccggggtggcgggcgcggggctgggggcgctgggaagaggggtccgctgtaaggccctcccgccgcctcggggccagtctgggtctagccacttcacctgtgtgcttgaaatgtcagttctttaccagccaggctgccgtttg

SEQ ID NO: 5417 - DNA, 600 bp, Homo sapiens
agcgctttctcttttcccccagaaagtctccaggcagcagctctgtgagatccttaagcaaggtaaggaaactcacccgctgcgctgcggcttcgtggccagcagggctgggacatactcgcctcacgcttcagcaccggggacagctcctgcctcgccaacttcggcagctcttctcgatgtctcgccgcgggctgtgcctcacaggctacgggaggggagagtgtctccccacgccggggtcccggcctctgggttttagggagcgcgaatgggtctccgacagcaacgggagcagccggtggcgcctcaggctgcggtggcaacgagcccgactgcactacggctttgcgggaccgcgccagcgcggaggagaccgagcccatctcagcgggccgggccggacccaggtgagcggccctggctccccgaggaatccacggccctcgcctgccgaaggcttactccctcctggtgccggggcgcccccagctgtctgctccgcctctgaccctgcgggctgcagcgaaggctgcgcgcccacccgcgggggaccggaacggagggtaatgcgggcggtgtccgcgcccgcctaacagt

SEQ ID NO: 5418 - DNA, 600 bp, Homo sapiens
tccgttttaagtaagaagaaaatacgtaattacgaaggaggctttacctttgggaaaacaaaaagccacttttgaccaattattcccacagatacacacccgggtccccaaccacccgccaggagggcccatcctggtgcctggaaggcgggggttcctgcgatctggggttgggatttcggctcaggccgtgcgcggtggccttgggtcgcgcccgccctgcctgggcccccagcccaagggaccgagcgggtgcgggcggggcgggcggggcgggcggggcgggggtgtcgggggctcggactcggagccgtccctgccagtggctttcgtgggcggccccgccttggagcccaggccaacgagccgcgcgggacggaagagctgcgggtggggagggacaagcgggcggagaaggggcggccctgctggaggcccagcgagtctgagtgattgacaagtgaatgagctgggaatgaagactcctggggccgggagggagagagggggttggagggtggtgaatgcctgggcctctggggctccaggctgccagtggcccgaccaggctctcggtgtcctcctccaacctcagtttcc

SEQ ID NO: 5419-5702 - skipped (284 entries)

SEQ ID NO: 5703 - DNA, 27 bp, Artificial Sequence
  source: /note="Description of Artificial Sequence: Synthetic forward primer"
ttatcgtagtgtttgtttgtggaagtc

SEQ ID NO: 5704 - DNA, 24 bp, Artificial Sequence
  source: /note="Description of Artificial Sequence: Synthetic forward primer"
cgaatttcggtagtcgtacggtat

SEQ ID NO: 5705 - DNA, 20 bp, Artificial Sequence
  source: /note="Description of Artificial Sequence: Synthetic forward primer"
gaaggaggttgcgcgttagt

SEQ ID NO: 5706 - DNA, 25 bp, Artificial Sequence
  source: /note="Description of Artificial Sequence: Synthetic forward primer"
gcgtttgagagcggtaatattagtg

SEQ ID NO: 5707 - DNA, 21 bp, Artificial Sequence
  source: /note="Description of Artificial Sequence: Synthetic forward primer"
cgttgttttaagagcgcgatt

SEQ ID NO: 5708 - DNA, 15 bp, Artificial Sequence
  source: /note="Description of Artificial Sequence: Synthetic forward primer"
tcgcggcgtgtttgc

SEQ ID NO: 5709 - DNA, 25 bp, Artificial Sequence
  source: /note="Description of Artificial Sequence: Synthetic forward primer"
ttttgtgagtttttcgggagtagtc

SEQ ID NO: 5710 - DNA, 16 bp, Artificial Sequence
  source: /note="Description of Artificial Sequence: Synthetic forward primer"
gaagcgggcgggttgt

SEQ ID NO: 5711 - DNA, 22 bp, Artificial Sequence
  source: /note="Description of Artificial Sequence: Synthetic forward primer"
atcgtttttcggtaggttttgg

SEQ ID NO: 5712 - DNA, 25 bp, Artificial Sequence
  source: /note="Description of Artificial Sequence: Synthetic forward primer"
tcggttttaggtggattgaagttta

SEQ ID NO: 5713 - DNA, 18 bp, Artificial Sequence
  source: /note="Description of Artificial Sequence: Synthetic forward primer"
cgtagagggcgggttggt

SEQ ID NO: 5714 - DNA, 19 bp, Artificial Sequence
  source: /note="Description of Artificial Sequence: Synthetic forward primer"
tgcggcggtagttgttttc

SEQ ID NO: 5715 - DNA, 23 bp, Artificial Sequence
  source: /note="Description of Artificial Sequence: Synthetic forward primer"
gtcgtagtgtagtcgggttcgtt

SEQ ID NO: 5716 - DNA, 22 bp, Artificial Sequence
  source: /note="Description of Artificial Sequence: Synthetic forward primer"
gggtgtttgggaaaatcgtaga

SEQ ID NO: 5717 - DNA, 25 bp, Artificial Sequence
  source: /note="Description of Artificial Sequence: Synthetic forward primer"
gagttggtgaggtcgtttagttagg

SEQ ID NO: 5718 - DNA, 26 bp, Artificial Sequence
  source: /note="Description of Artificial Sequence: Synthetic forward primer"
tgtaggagatgagtttagcgtaaagg

SEQ ID NO: 5719 - DNA, 26 bp, Artificial Sequence
  source: /note="Description of Artificial Sequence: Synthetic forward primer"
tcgttgcgtaagtatatgaaggtgta

SEQ ID NO: 5720 - DNA, 21 bp, Artificial Sequence
  source: /note="Description of Artificial Sequence: Synthetic forward primer"
cgcgaaggaaagtgttacgaa

SEQ ID NO: 5721 - DNA, 18 bp, Artificial Sequence
  source: /note="Description of Artificial Sequence: Synthetic forward primer"
gcgttgggtttcgggttt

SEQ ID NO: 5722 - DNA, 25 bp, Artificial Sequence
  source: /note="Description of Artificial Sequence: Synthetic forward primer"
ggttttcgtttttaagaggtcgttt

SEQ ID NO: 5723 - DNA, 26 bp, Artificial Sequence
  source: /note="Description of Artificial Sequence: Synthetic forward primer"
tgagtcgtaagttttggattcgtaga

SEQ ID NO: 5724 - DNA, 26 bp, Artificial Sequence
  source: /note="Description of Artificial Sequence: Synthetic forward primer"
cgttgtcgtcgttttttttagttaga

SEQ ID NO: 5725 - DNA, 23 bp, Artificial Sequence
  source: /note="Description of Artificial Sequence: Synthetic forward primer"
gtggagaatttcgttacgttggt

SEQ ID NO: 5726 - DNA, 27 bp, Artificial Sequence
  source: /note="Description of Artificial Sequence: Synthetic forward primer"
ggattgtaggatagttatcggtttgag

SEQ ID NO: 5727 - DNA, 20 bp, Artificial Sequence
  source: /note="Description of Artificial Sequence: Synthetic forward primer"
cggattcggagtcgtttttg

SEQ ID NO: 5728 - DNA, 29 bp, Artificial Sequence
  source: /note="Description of Artificial Sequence: Synthetic forward primer"
gcgtttagtaagtagttttgagtttcgta

SEQ ID NO: 5729 - DNA, 23 bp, Artificial Sequence
  source: /note="Description of Artificial Sequence: Synthetic forward primer"
cggagtcgtagagcgagttagag

SEQ ID NO: 5730 - DNA, 25 bp, Artificial Sequence
  source: /note="Description of Artificial Sequence: Synthetic forward primer"
ttgtaggttaggatacgcgattttt

SEQ ID NO: 5731 - DNA, 20 bp, Artificial Sequence
  source: /note="Description of Artificial Sequence: Synthetic reverse primer"
cccactccgcgctaaactaa

SEQ ID NO: 5732 - DNA, 15 bp, Artificial Sequence
  source: /note="Description of Artificial Sequence: Synthetic reverse primer"
ccgatcgccgcgaat

SEQ ID NO: 5733 - DNA, 23 bp, Artificial Sequence
  source: /note="Description of Artificial Sequence: Synthetic reverse primer"
caaaatacgaaacaacgcgtaca

SEQ ID NO: 5734 - DNA, 26 bp, Artificial Sequence
  source: /note="Description of Artificial Sequence: Synthetic reverse primer"
cctactcgtctaaactcacaacgaaa

SEQ ID NO: 5735 - DNA, 24 bp, Artificial Sequence
  source: /note="Description of Artificial Sequence: Synthetic reverse primer"
cgcaacaactccaaattcactact

SEQ ID NO: 5736 - DNA, 19 bp, Artificial Sequence
  source: /note="Description of Artificial Sequence: Synthetic reverse primer"
cccgatatctccgcgaaaa

SEQ ID NO: 5737 - DNA, 19 bp, Artificial Sequence
  source: /note="Description of Artificial Sequence: Synthetic reverse primer"
cgaaccgctcgaaaaaacc

SEQ ID NO: 5738 - DNA, 25 bp, Artificial Sequence
  source: /note="Description of Artificial Sequence: Synthetic reverse primer"
gctcacgaaaacgaaaaactaaaat

SEQ ID NO: 5739 - DNA, 24 bp, Artificial Sequence
  source: /note="Description of Artificial Sequence: Synthetic reverse primer"
caacatcgtaaaaccgaacgtaaa

SEQ ID NO: 5740 - DNA, 21 bp, Artificial Sequence
  source: /note="Description of Artificial Sequence: Synthetic reverse primer"
cccgaaaccgcctctaactta

SEQ ID NO: 5741 - DNA, 20 bp, Artificial Sequence
  source: /note="Description of Artificial Sequence: Synthetic reverse primer"
gcgcaacactaacgaatcca

SEQ ID NO: 5742 - DNA, 20 bp, Artificial Sequence
  source: /note="Description of Artificial Sequence: Synthetic reverse primer"
gaacgaccgcacttcacctt

SEQ ID NO: 5743 - DNA, 21 bp, Artificial Sequence
  source: /note="Description of Artificial Sequence: Synthetic reverse primer"
cgcgaataaatctccgacaac

SEQ ID NO: 5744 - DNA, 20 bp, Artificial Sequence
  source: /note="Description of Artificial Sequence: Synthetic reverse primer"
cgccgcaactacgaaaactc

SEQ ID NO: 5745 - DNA, 20 bp, Artificial Sequence
  source: /note="Description of Artificial Sequence: Synthetic reverse primer"
gcccgctacgctatacgaaa

SEQ ID NO: 5746 - DNA, 17 bp, Artificial Sequence
  source: /note="Description of Artificial Sequence: Synthetic reverse primer"
ccacaacgcgcaaacca

SEQ ID NO: 5747 - DNA, 26 bp, Artificial Sequence
  source: /note="Description of Artificial Sequence: Synthetic reverse primer"
aacgacacgaaaacaaacgatataac

SEQ ID NO: 5748 - DNA, 20 bp, Artificial Sequence
  source: /note="Description of Artificial Sequence: Synthetic reverse primer"
cgcaactaccgccgtttcta

SEQ ID NO: 5749 - DNA, 23 bp, Artificial Sequence
  source: /note="Description of Artificial Sequence: Synthetic reverse primer"
cgactccccgctactacaaataa

SEQ ID NO: 5750 - DNA, 26 bp, Artificial Sequence
  source: /note="Description of Artificial Sequence: Synthetic reverse primer"
ctcctctaccgacgaattatcactaa

SEQ ID NO: 5751 - DNA, 26 bp, Artificial Sequence
  source: /note="Description of Artificial Sequence: Synthetic reverse primer"
aaaacgacgaaactaaaacgtaaacc

SEQ ID NO: 5752 - DNA, 23 bp, Artificial Sequence
  source: /note="Description of Artificial Sequence: Synthetic reverse primer"
ccgcgctacttaaaaaaccactt

SEQ ID NO: 5753 - DNA, 19 bp, Artificial Sequence
  source: /note="Description of Artificial Sequence: Synthetic reverse primer"
acgcgccaacacgataatc

SEQ ID NO: 5754 - DNA, 25 bp, Artificial Sequence
  source: /note="Description of Artificial Sequence: Synthetic reverse primer"
gacctaaaaccgttaacctcgaatt

SEQ ID NO: 5755 - DNA, 24 bp, Artificial Sequence
  source: /note="Description of Artificial Sequence: Synthetic reverse primer"
gcgactcgttaacctaaactccaa

SEQ ID NO: 5756 - DNA, 22 bp, Artificial Sequence
  source: /note="Description of Artificial Sequence: Synthetic reverse primer"
aaacaaaaaccgaaaccgaaca

SEQ ID NO: 5757 - DNA, 19 bp, Artificial Sequence
  source: /note="Description of Artificial Sequence: Synthetic reverse primer"
gaaacgcgacgaacgaaaa

SEQ ID NO: 5758 - DNA, 19 bp, Artificial Sequence
  source: /note="Description of Artificial Sequence: Synthetic reverse primer"
cgaacgcgtatcgtccaaa

SEQ ID NO: 5759 - DNA, 17 bp, Artificial Sequence
  source: /note="Description of Artificial Sequence: Synthetic probe"
cgtgcgtcgcgcgcgta

SEQ ID NO: 5760 - DNA, 28 bp, Artificial Sequence
  source: /note="Description of Artificial Sequence: Synthetic probe"
tttttcgggcgagtataggaagtgggtg

SEQ ID NO: 5761 - DNA, 23 bp, Artificial Sequence
  source: /note="Description of Artificial Sequence: Synthetic probe"
ttcgggtttaggcgtcgtgacgg

SEQ ID NO: 5762 - DNA, 22 bp, Artificial Sequence
  source: /note="Description of Artificial Sequence: Synthetic probe"
agcggtagttcgcggcgaggtt

SEQ ID NO: 5763 - DNA, 23 bp, Artificial Sequence
  source: /note="Description of Artificial Sequence: Synthetic probe"
atcgaggtagcgatagcggcggg

SEQ ID NO: 5764 - DNA, 19 bp, Artificial Sequence
  source: /note="Description of Artificial Sequence: Synthetic probe"
ttggtcgtgtcgtggcgcg

SEQ ID NO: 5765 - DNA, 19 bp, Artificial Sequence
  source: /note="Description of Artificial Sequence: Synthetic probe"
cggttgttgcgcggcgttg

SEQ ID NO: 5766 - DNA, 18 bp, Artificial Sequence
  source: /note="Description of Artificial Sequence: Synthetic probe"
cgggcggttcgagtgcgg

SEQ ID NO: 5767 - DNA, 21 bp, Artificial Sequence
  source: /note="Description of Artificial Sequence: Synthetic probe"
attcggcgacggttgatcgcg

SEQ ID NO: 5768 - DNA, 24 bp, Artificial Sequence
  source: /note="Description of Artificial Sequence: Synthetic probe"
tgtagttggaagggcgcgcgatag

SEQ ID NO: 5769 - DNA, 14 bp, Artificial Sequence
  source: /note="Description of Artificial Sequence: Synthetic probe"
cgatcgcgcgtcgg

SEQ ID NO: 5770 - DNA, 24 bp, Artificial Sequence
  source: /note="Description of Artificial Sequence: Synthetic probe"
cgcggtgacggcgtttttaattga

SEQ ID NO: 5771 - DNA, 33 bp, Artificial Sequence
  source: /note="Description of Artificial Sequence: Synthetic probe"
ttatcgtagtttgaggcgttatcggttgttttc

SEQ ID NO: 5772 - DNA, 27 bp, Artificial Sequence
  source: /note="Description of Artificial Sequence: Synthetic probe"
cgaggcgaagtgttttttagggaagcg

SEQ ID NO: 5773 - DNA, 25 bp, Artificial Sequence
  source: /note="Description of Artificial Sequence: Synthetic probe"
ttggttagcgtgcgatataggcgcg

SEQ ID NO: 5774 - DNA, 23 bp, Artificial Sequence
  source: /note="Description of Artificial Sequence: Synthetic probe"
aatttcgtagcggcgagtgcggt

SEQ ID NO: 5775 - DNA, 31 bp, Artificial Sequence
  source: /note="Description of Artificial Sequence: Synthetic probe"
cgttcgtcgtcgtttagttttggttacgatt

SEQ ID NO: 5776 - DNA, 29 bp, Artificial Sequence
  source: /note="Description of Artificial Sequence: Synthetic probe"
cgtttttcgtcgacgttatttgttttgcg

SEQ ID NO: 5777 - DNA, 19 bp, Artificial Sequence
  source: /note="Description of Artificial Sequence: Synthetic probe"
tcggaggagcgggttgcgg

SEQ ID NO: 5778 - DNA, 26 bp, Artificial Sequence
  source: /note="Description of Artificial Sequence: Synthetic probe"
ttcgcggcgtagagcgtagttacgtt

SEQ ID NO: 5779 - DNA, 32 bp, Artificial Sequence
  source: /note="Description of Artificial Sequence: Synthetic probe"
ttgtcggtgttcgttcgagagttttattagcg

SEQ ID NO: 5780 - DNA, 25 bp, Artificial Sequence
  source: /note="Description of Artificial Sequence: Synthetic probe"
tcggtgggattggttgcgttgtttt

SEQ ID NO: 5781 - DNA, 25 bp, Artificial Sequence
  source: /note="Description of Artificial Sequence: Synthetic probe"
tgttcggtttgattttcgcgttggg

SEQ ID NO: 5782 - DNA, 25 bp, Artificial Sequence
  source: /note="Description of Artificial Sequence: Synthetic probe"
ttttggcgtggattcgattgtgtcg

SEQ ID NO: 5783 - DNA, 25 bp, Artificial Sequence
  source: /note="Description of Artificial Sequence: Synthetic probe"
tagtggttttcgtgggcggtttcgt

SEQ ID NO: 5784 - DNA, 32 bp, Artificial Sequence
  source: /note="Description of Artificial Sequence: Synthetic probe"
ttttcggagcgtattcggtattttcgttgttt

SEQ ID NO: 5785 - DNA, 23 bp, Artificial Sequence
  source: /note="Description of Artificial Sequence: Synthetic probe"
cgagagcggtgagattttgcgga

SEQ ID NO: 5786 - DNA, 26 bp, Artificial Sequence
  source: /note="Description of Artificial Sequence: Synthetic probe"
cggtaggttttttgcgttagcggtgg

SEQ ID NO: 5787 - DNA, 72 bp, Homo sapiens
tcaccgtagtgcttgtttgtggaagccgagcgtgcgtgcgccgcgcgcgcacccagtccagcgcggagtggg

SEQ ID NO: 5788 - DNA, 103 bp, Homo sapiens
ccggtcgccgcgggttcaccgctcagtccccgcgctcgctccgcaccccacccacttcctgtgctcgcccggggggcgtgtgccgtgcggctgccggagttcg

SEQ ID NO: 5789 - DNA, 79 bp, Homo sapiens
gaaggaggctgcgcgccagcccgcccgcggcgcccgggctcaggcgccgtgacggctgcacgcgctgccccgcactctg

SEQ ID NO: 5790 - DNA, 89 bp, Homo sapiens
cctgctcgtctgggctcacagcgaaggcagcctcgccgcgagctgccgctgccgctgctgccgccactggtgttgccgctctcaggcgc

SEQ ID NO: 5791 - DNA, 103 bp, Homo sapiens
cgcagcagctccagattcactgctctcccctgcagctccccgcgcccccgccgctgtcgctgcctcggtgtcccccagccccagtcgcgctcttaggacagcg

SEQ ID NO: 5792 - DNA, 85 bp, Homo sapiens
cccggtgtctccgcgagggcggcggcggccagcagacggcgatcgaggcgcgcgccacggcacggccagcgcagacacgccgcgg

SEQ ID NO: 5793 - DNA, 95 bp, Homo sapiens
cggaccgctcgggagagccccaggagaggccagcgccgcgcagcagccgccccgctgcgcccacctccccggctgctcccggagggctcacaaag

SEQ ID NO: 5794 - DNA, 62 bp, Homo sapiens
gaagcgggcgggctgcacgggcggctcgagtgcggggaccccagcccctcgccctcgtgagc

SEQ ID NO: 5795 - DNA, 75 bp, Homo sapiens
accgttctccggcaggttttgggatccggcgacggctgaccgcgcgccgcccccacgcccggttccacgatgctg

SEQ ID NO: 5796 - DNA, 83 bp, Homo sapiens
tcggtcccaggtggactgaagtccagagcggcgctgtgcagctggaagggcgcgcgatagctcaagttagaggcggccccggg

SEQ ID NO: 5797 - DNA, 82 bp, Homo sapiens
cgcagagggcgggctggctgcggggcgaccgcgcgccggggccatgccgcgctccttcctggtggactcgctagtgctgcgc

SEQ ID NO: 5798 - DNA, 85 bp, Homo sapiens
gagcggccgcacttcaccttacggaggggagataatgagatcaattagaggcgccgtcaccgcgccggagacagctgccgccgca

SEQ ID NO: 5799 - DNA, 81 bp, Homo sapiens
cgcgaatgggtctccgacagcaacgggagcagccggtggcgcctcaggctgcggtggcaacgagcccgactgcactacggc

SEQ ID NO: 5800 - DNA, 115 bp, Homo sapiens
gggtgcctgggaaaatcgcagacgccggggaggagcagggggcggtgatgggaaggggagctgcgaggcgaagtgttcttcagggaagcgggctcgagtctccgcagctgcggcg

SEQ ID NO: 5801 - DNA, 85 bp, Homo sapiens
gcccgctgcgctatgcggggctcgtctccccgcgcctatgtcgcacgctggccagcgcctcctggctaagcggcctcaccaactc

SEQ ID NO: 5802 - DNA, 70 bp, Homo sapiens
tgcaggagatgagctcagcgcaaagggaaccccgcagcggcgagtgcggctgctggcctgcgcgctgtgg

SEQ ID NO: 5803 - DNA, 89 bp, Homo sapiens
ggcgacacgagggcagacggtgtagccgaatcgtagccagagctgggcggcggcgagcgcccgtgcaccttcatgtgcttacgcagcga

SEQ ID NO: 5804 - DNA, 84 bp, Homo sapiens
cgcgaaggaaagtgctacgaacgtcaaatggccgccccccgccgacgccatctgctctgcgaagcagaaacggcggcagctgcg

SEQ ID NO: 5805 - DNA, 67 bp, Homo sapiens
gcgctgggcctcgggtttggcggcccggaggagcgggctgcggattacctgcagcagcggggagccg

SEQ ID NO: 5806 - DNA, 82 bp, Homo sapiens
ctcctctgccgacgagttgtcactgggcgaggcgtagctgcgctctacgccgcggaggggcggcctcttggaggcggggacc

SEQ ID NO: 5807 - DNA, 86 bp, Homo sapiens
tgagccgcaagccttggactcgcagagctgccggtgcccgtccgagagccccaccagcgcggctcacgcctcagtctcgccgcccc

SEQ ID NO: 5808 - DNA, 76 bp, Homo sapiens
cgctgccgccgcctcctccagccagagtcggtgggactggctgcgctgccctgaagtggttctccaagcagcgcgg

SEQ ID NO: 5809 - DNA, 90 bp, Homo sapiens
gtggagaacttcgtcacgctggtggtgttcggcctgatcttcgcgctgggtgtgctgggcaacagcctagtgatcaccgtgctggcgcgc

SEQ ID NO: 5810 - DNA, 84 bp, Homo sapiens
ggcctaaggccgttgacctcgggttctccccggcacagtcgaatccacgccagggccctcaggccggtagctgtcctgcagtcc

SEQ ID NO: 5811 - DNA, 71 bp, Homo sapiens
cggactcggagccgtccctgccagtggctttcgtgggcggccccgccttggagcccaggccaacgagccgc

SEQ ID NO: 5812 - DNA, 102 bp, Homo sapiens
gggcaagggccggggccggacacaggagcagcggggatgccgggtgcgctccgagggtgtggcccccgggctgtgcggggctcagagctgcttgctgggcgc

SEQ ID NO: 5813 - DNA, 71 bp, Homo sapiens
cggagccgcagagcgagctagagagcgagagcggtgagactctgcggacgtcttcccgcccgccgcgctcc

SEQ ID NO: 5814 - DNA, 84 bp, Homo sapiens
cgggcgcgtatcgtccagaccggagcaccgccccaccgctagcgcaggagacctgccggggaagtcgcgtgtcctgacctgcag
